United States Patent Application Publication US 2005/0064454 A1 - sequence listing, part 2

SEQ ID NO: 2723 - DNA, 2535 bp, Homo sapiens
ggcccagacgccaaggttgcgggtcatggagtcccgaaccctcctcctgctgttctcgggagccgtggccctgatccagacctgggcagattacaattacaatcaaggcagaaatgatctcatttttacattacaactcctggaaaaggcaatagactgagatgcaagtgtgcccccaagtgatgggcagaaggagagaaggatgttttggatgcattctagaacacaggtaatctaaggagagttgatycaaggcacgtaggaagagtcctccagccactattaggccatcaaaggagtcctcatgtgtcccaggaaatggtcctgctttggtgtccctggtgtgacccatcacccgctggaacagcctgagagaagtagggcctctgcaccaatgctgctgaggatgtcagagcacaggaacgaggccttgggaaattacctggaaatgcgactgaaatcttccttcctgaggggtctgggctcttggaaatcaaaccctctcaggttgggtggctggacgattctcctcacacttacaatgggacaaggggaaccaggaggtccaaggatccctgggttccacacgaactcctcctaccctcattgtgtgacagcagccatgcctcctcctggggatcaggatctattacctgtgcctggagaggaggggactcctcttctcacccgctggtctctggacacatactgtccaattcccctgtggcagctgtaatgtgtagttcaatgggcactcatttgtcccttttaagggtaccctcctttagaatccaggaccttctaccctgcagagtgtggtttggggagagaagtgcaaaatcccacgacaggtgagttgaaggaatgggatatggagccacatccacttccaccccttggtatctggacccacgtgttcttcctactgagattacagaactgtagagatgtctttgatttttaaaatgcaccatgtcctgaaagatggcaccctcccacccgcaggagtgcttcctgcaagctggcgttgagctgtgcctatagaagctcttttcaacattctttatggtccaggagcccttggttggtgcagatggtgataggacccagtgggtcccacagcatggccacactgcacctccttcgctgtcaagtgggtcccccacgaagatactgcacggagagcagtgccaagcctgtggatcaggaatatcaacagcccccagagagtggtgctggctgagggtctgagagcaggacaggaaaacccacctatggaataggtgcctatccctgtgaagatgaacctctggcccttccaggatggaaggagtgcaatgtagtcaactcctcacttagggtctggttggtcacctaaagaaatagagccctaccagggaagatcattgggttcaaatgctgatgagtaggacatttagaggtggcagtgtctggatctaccttggtaggagggagtcagtactgttggacccataggtagcctcatccctgccactgtgtttgctccatttatgtacccacctacccggcctgggctgaccatgggaaggctggctaatttcagtgcttgtgcttggttgttcagggccatttcaggtttgggtgttttctggggatgttaacatgggattcaggctcaactcacaagaaacttttcatctcatgatggatgctgttgggcatgtccaatgtatgacttcatgagttacacagatgctaattcgtaggggcacttggaatcacatggttgttttgtgtcccatggtcaagcattctatcttatcagggcctacagtaacatgccaaaagttgcttccaacatatttctctgctttggatggggcatatttctgtgctgtggatgacatggccttactccagaatcccaggccctccactgtgactctcctactggtgcttggttcagctccaccccaaatcttaccccaccactggcactttcagcaccagggggtctgaaggatggtgactgcgccatggcctggatctgctgcagtgtcctttcctgtggaggctccactcaaagctggcatcctcctatgtcacctagagtgtgggtcaaagcaatacacctacatgtagaatgtgatgtcagaactcaaacaggctcaccaggcagtgtgcttcttccttgcatgaggatgcaagatgcaacagtttgtcttcacattggaaggacacccctggatgcccctaaccactagacctgtaaaacttcactgcagtggccacttctgaatctctgtaaggtttatttatcttcacccctctggagagaagatgttttaccaaagcctctagtgtaccgtcctcctcttactcatccatcccagtcaacatgatgttgtcaatgaaataaaggaatttaatattctatagtatatccaggttctccagatctcttaagactgtactatagaggcctggggaattataatagccctgaggcaaactatgaattaaagtgttgtggatcccacatgaaaaaaaaaa

SEQ ID NO: 2724 - DNA, 5911 bp, Homo sapiens
cttgttcctccgccgttgcaatgaactattttctctcagtccggggtggtacttttgagtaaccccttccaaatagaaacccataccagcctatttagctcggtctccactatatgaaggtttcctagggcttggtgtgacgcaacgtatacgaggctcggaaggacaccccgcggaaggatccggtttgttgtggtgtggggaggggagacgctgacaaaccaagatggcggcggcggcgctgaaggccgcggcgtttgggaggtaactgtggtggcgaaggctgcggtagtggggaggcaaccacacagtttggaagaaacggagcgggacgaagaggcggtagcagtagagtcagcctgagactctcagagcacgacggccacacgcccccttaggccctcggcgggcggcggctgcccgcttaggcctagcctccgagcattgcctcggcttcaaacagcggcggcgccatgagtccttaagggcggtccaagcctcccgatccctggcccagacctcgggcccaccatggagccggggtccgacgatttcctaccgccaccggagtgcccggtgttcgagcctagctgggccgagttccgagaccctcttggctacatcgcgaaaatcaggcccatcgcagagaaatcgggcatttgcaagatccgcccacccgcggactggcagccaccctttgctgtggaagtggacaacttcaggtttaccccccgaatccagaggctgaatgagctagaggcccagacgagagtgaaactgaactacttggaccagattgccaaattctgggaaatccagggctcctccttaaagattcccaatgtagaacggcggatcttggacctctacagtctcagcaaaattgtggtggaggaaggtggttatgaagctatctgcaaggaccgtcggtgggctcgggtagcccagcgcctcaactatccaccaggcaaaaatattggctccttgctacgctcccactacgaacgcattgtttatccctatgaaatgtaccagtctggagccaaccttgtgcagtgtaacacacgtccatttgataatgaggagaaggacaaggaatacaaaccccacagcatccccctacgacagtctgtgcagccttccaagttcaacagctatggccggcgggccaagagactgcagcctgatccggaacccacagaggaagacattgagaagaatccagagctgaaaaagctacagatctatggggcaggccccaagatgatgggcctgggcctcatggccaaagacaagactctgcggaagaaagataaggaggggcctgagtgtccccccacagtagtggtgaaggaggagttaggtggggatgtgaaggtggagtcaacatcgcctaagaccttcctggagagcaaggaggagctgagtcacagcccagaaccctgcaccaagatgaccatgaggctacggaggaaccacagcaatgcccagtttattgagtcatatgtctgccggatgtgttctcgaggggatgaggatgacaagctcctgctgtgtgatggctgtgatgacaactaccacatcttctgcctgctgcctcctctgcctgagatccccaagggtgtctggcggtgcccaaagtgtgtcatggcggagtgtaagcggcccccagaagcctttggctttgagcaggctacccgggaatacactctgcagagctttggcgagatggccgactcctttaaagctgactacttcaacatgcccgtgcatatggtgcccacagaacttgtggagaaggagttctggaggctggtaaatagcattgaggaagatgtgactgttgagtatggagctgacatccattccaaagaatttggcagcggtttccctgtcagtgacagtaaacggcacctaacccccgaagaggaggagtatgctaccagtggttggaacctaaatgtgatgccggtgttggaacagtctgtactgtgccacatcaatgcagatatctctggcatgaaggtgccctggctctacgtgggcatggtcttctcagccttttgctggcatattgaggatcactggagttactccattaactacctccactggggtgagccgaagacctggtatggggtgccctcacttgcagcagaacatttggaagaagtgatgaagaagctgacacctgaactatttgatagccagcctgacctcctgcaccaacttgtcaccctcatgaatcccaacaccctcatgtcccatggtgtgccagttgtccgcacaaaccagtgtgcaggagagtttgtcatcaccttcccccgtgcttaccacagcggcttcaaccaaggctacaactttgccgaggctgtcaacttttgcactgctgactggttgcctgctgggcgccagtgcattgagcactaccgccggctccggagatactgcgtcttctcccatgaggagcttatctgcaagatggctgcctgcccagagaagctagacctgaacctggcggcagctgtgcataaggagatgttcatcatggtgcaagaagagcggcgtctacgaaaggccctgctggagaagggtatcacagaggctgagcgagaggctttcgagctgctcccagatgatgagcgccagtgtatcaagtgcaagactacgtgtttcctgtcagccctggcctgctacgactgcccagacggccttgtctgcctttcccacatcaatgatctctgcaagtgctccagtagccggcagtacctgcggtatcggtataccttggatgagcttcctgccatgctgcataagctgaaggttcgggctgagtcctttgacacctgggccaacaaagtgcgagtggccctggaggtggaggatgggcggaagcgcagccttgaagaactgagggcactagagtctgaagcccgtgagcggaggtttcctaatagtgagctgctgcagcaactaaagaactgcctgagtgaggcagaggcttgcgtgtcccgagctctgggactggtcagcggccaggaagctggcccccacagggtggctggtctacagatgaccctgactgagctccgggcctttctggaccagatgaacaacctgccttgcgccatgcaccagattggggatgtcaagggtgttctggaacaggtggaggcctaccaggctgaggctcgtgaggccctggcctcactgccctccagtccagggctactgcagtccctgttggagagggggcggcagctgggggtggaggtgcctgaggcccagcagctccagcggcaggtggaacaggcgcgatggctggatgaggtgaaacgcacactggccccctcagcccgaaggggcaccttggctgtcatgcgaggactgttggtcgcgggtgccagtgtagcccctagccctgctgtggataaagcccaggccgagctgcaggaactgctgaccattgctgaacgctgggaggagaaagcccacctctgcctggaggccaggcagaagcatccaccagccacacttgaggccataatccgtgaagcggaaaacatccctgttcacctgcccaacatccaggctctcaaggaggctcttgctaaggcccgggcctggattgctgatgttgatgagatccaaaatggtgaccactacccctgcctggatgacttggagggcctagtagctgtgggccgggacctacctgtggggctggaggagctgagacagctagagctacaggtactgacagcgcactcctggagggagaaggcctccaagaccttcctcaagaaaaattcttgctacacgctgctggaggttctctgcccatgtgcagatgccggctcagacagcaccaagcgcagccggtggatggagaaggagctggggttgtacaaatctgacacagagctgctggggctgtctgcgcaggacctcagggacccaggctctgtgatcgtggccttcaaggagggggaacagaaggagaaggagggtatcctgcagctgcgtcgcaccaattcggccaagcccagtccactggcatcatcgagcacggcctcctctacaacctctatctgtgtgtgtgggcaggtgctggctggggcgggacgtctgcagtgtgacctgtgtcaggactggttccatgggcggtgtgtgtcagtgcctcgcctcctcagctctccgaggcccaatcccacctcatccccactgctggcctggtgggaatgggacaccaaattcctgtgtccactgtgtatgcgctcaaggcgcccgcgcctggagaccatcctggcactgctggtagccctgcagagactgcctgtgcggctgcccgagggcgaggccctgcagtgcctcacagagagggccatcagctggcaaggccgcgccaggcaggctctggcctctgaagatgtgactgctcttttgggacggctggctgagctccgccaacggctacaggctgaacctagacctgaggagcctcctaactaccctgcagcccctgcttctgaccccctcagagagggcagtggcaaggatatgcctaaggtccagggcttactggagaatggagacagtgtgaccagtcctgagaaggtagccccggaggagggctcaggtaagagagatctggagctgctgtcctcgctgttgccacagttgactggccctgtgttggaactgcctgaggcaacccgggcccccttggaggagctcatgatggagggggacctgctcgaggtgaccctggatgagaaccacagcatatggcagctgctgcaggctggacagcccccagacctggagaggatccgcacacttctggagctggagaaggcagagcgtcacgggagtcgggctcggggccgggccctggagaggcggcggcggcggaaggtggatcggggtggggagggcgatgacccagcccgagaggagctagagccaaagagggtacggagctcagggccagaggctgaggaggtccaggaggaggaagagctggaggaggagactgggggtgagggcccccctgcacccatccccaccactggcagccccagcacccaggagaaccagaatggcttggaaccggcggaagggaccacttcaggcccctcggcccctttctccactctgactccccggctgcatctgccctgcccacagcagccgcctcagcaacagttgtgacagtggctgagcctagcacagaccctgacagagacccccctcggcctcaaggatcctctttctgaccatcaagcctgcttcttggggggtgggcgggtagggggggtggccatccctgctacccgcccacccctgagtcccttgacttttgtattctgactccaaggtattgttcagacctcagctcctgggggccggcccctggagtcttccctccctggtagcctctaaccagcattcccagacacctgaggcagatagatggatgggctggtgggcaggggggtggctggggctgggccatcaccattccagagacaaggccagtgtatatgcaaactgggggactctcctcccttctctccccagttctggtcctggccaggccatgctacactaacccctgcccccactctcctcccctcttttccttccttcctacccccttctccctctcccttcccctgactgttccacccaggaggaggaaacttcacatagccgtgctcacagttttttattttaaaggaatttggctggggagctgaacagggctccctgtgatctgaagaaagcttttggtgcttgtcctcacaaccacctcagtcctccctccctgtcctcccctgtctcctttcctcctcctgggttcatgttgtaataaaagaagattgttggtgtgtaattaatttgttca

SEQ ID NO: 2725 - DNA, 1973 bp, Homo sapiens
tcccagggtcccgggttgggggggtggagcagcatttcgtcgccgcgggggtgccgggactccggccgcagtgtcgccgccatcacggacttcctgtgggacaagcgcacgggcctcgccgccagaacgatgccgcatcctcgaaggtaccactcctcagagcgaggcagccgggggagttaccgtgaacactatcggagccgaaagcataagcgacgaagaagtcgctcctggtcaagtagtagtgaccggacacgacggcgtcggcgagaggacagctaccatgtccgttctcgaagcagttatgatgatcgttcgtccgaccggagggtgtatgaccggcgatactgtggcagctacagacgcaacgattatagccgggatcggggagatgcctactatgacacagactatcggcattcctatgaatatcagcgggagaacagcagttaccgcagccagcgcagcagccggaggaagcacagacggcggaggaggcgcagccggacatttagccgctcatcttcgcagcacagcagccggagagccaagagtgtagaggacgacgctgagggccacctcatctaccacgtcggggactggctacaagagcgatatgaaatcgttagcaccttaggagaggggaccttcggccgagttgtacaatgtgttgaccatcgcaggggtggggctcgagttgccctgaagatcattaagaatgtggagaagtacaaggaagcagctcgacttgagatcaacgtgctagagaaaatcaatgagaaagaccctgacaacaagaacctctgtgtccagatgtttgactggtttgactaccatggccacatgtgtatctcctttgagcttctgggccttagcaccttcgatttcctcaaagacaacaactacctgccctaccccatccaccaagtgcgccacatggccttccagctgtgccaggctgtcaagttcctccatgataacaagctgacacatacagacctcaagcctgaaaatattctgtttgtgaattcagactatgagctcacctacaacctagagaagaagcgagatgagcgcagtgtgaagagcacagctgtgcgggtggtagactttggcagtgccacctttgaccatgagcaccatagcaccattgtctccactcgccattaccgagcaccagaagtcatccttgagttgggctggtcacagccttgtgatgtgtggagtataggctgcatcatctttgaatactatgtgggattcaccctcttccagacccatgacaacagagagcatctagccatgatggaaaggatcttgggtcctatcccttcccggatgatccgaaagacaagaaagcagaaatatttttaccggggtcgcctggattgggatgagaacacatcagctgggcgctatgttcgtgagaactgcaaaccgctgcggcggtatctgacctcagaggcagaggaacaccaccagctcttcgatctgattgaaagcatgctagagtatgaaccagctaagcggctgaccttgggtgaagcccttcagcatcctttcttcgcccgccttcgggctgagccgcccaacaagttgtgggactccagtcgggatatcagtcggtgacgatcaggccctgggcccccctgcatcttttatagcagtgggtgtccagtccaggacactggtgcttttttatacaagagaacgagccagagttcactccttcctcctggctctctatatacctgtgaatatgtgaaatagtgtaaatatgaaagaacttgtacctatcacttcaacccctgccttgtacataatactattccatccacacagtttccaccctcacctgccccctcatacggagttggatgggggccgagtgaggtaaccaggtggcatctaccccatgttttataaggaattttgtacagtctttgtgaaataaaataacgtgcttcatttga

SEQ ID NO: 2726 - DNA, 4657 bp, Homo sapiens
tttagacagctgtggaggccacaaaagagctccctgttgcttctcaggccctgcctgtggtgggtgtggagtctgtgtaggtctggtgggagacggggtgttctggtcattcctgccaataggcaacaccaggagggtggaagtggaccggccacatcattaaccctgtgcagcctgggcaggtggttttagggaaaccaagctgagggggttggggtgctgagcttgctggcaggaggaaggggtgctttgggtcttagaccccagcctgggggtgacagattctggccctgccttggcatcaggtatcagaagcatgtgcacacgtatcgcattctgcctgatggagaagatttcttggctgtgcagacctcgcagggtgtgcctgtgccccgcttccagaccctgggtgagctcatcggcctgtacgcccagcccaaccagggccttgtgtgcgccctgcctcttcctgtatagggtgagcgagagccggacccaccggatgaccgggatgcctcagatggggaggatgagaagcccccgctgcccccgcgctctggctccaccagcatttctgccccccactgggcccagcagtcccctgccagctcctgagactcccacagctccagctgctgagagtgctcccaatgggctgagcaccgtctcgcacgactacctgaaaggcagctatgggctggacctggaagctgtgaggggtggagccagccacctgccccacctcacccgtaccctcgctacctcatgccggaggctgcacagtgaggtggacaaggtcctgtcaggcctggagatcctgtccaaggtgtttgaccagcagagctcgcccatggtgacccgccttttgcagcagcagaacctgccacagacaggggagcaggaactagagagcctggtgctgaagctgtcagtgctaaaggacttcctgtcaggcatccagaagaaggccctgaaggccctacaggacatgagctccacagcacccccagctccgcagccatccacacgtaaggccaagaccatgcccgtgcaggcctttgaggtgaagctagacgtgaccctgggtgacctgaccaagattgggaagtcacagaagttcacgctgagcgtggatgtggagggtgggcggctggtgctgctgcggagacagcgggactcccaggaggactggaccaccttcacgcacgaccgcatccgccagctcattaagtcccagcgtgtccagaacaagctgggtgttgtgtttgagaaggagaaggaccggactcagcgcaaggacttcatctttgtcagtgcccggaagcgggaggccttctgccagctgttgcagctcatgaagaacaagcactccaagcaggacgagcccgacatgatctcagtcttcataggcacctggaacatgggaagtgtaccacctccaaaaaacgtgacatcctggttcacatcgaagggtctggggaagaccctggacgaggtcacagtgaccataccccatgacatctatgtctttgggacccaggagaactcagtgggcgaccgcgagtggctggacctactgcgcgggggcctcaaggagcttacggatctggattaccgcccgattgccatgcaatcactgtggaatatcaaggtggcagtgctggtcaagccagagcacgagaaccgtatcagccatgtcagtacgtccagtgtgaagactggcatcgccaacaccctggggaacaagggggctgtgggcgtctccttcatgtttaatggcacctcatttggctttgtgaattgtcacctcacctcgggaaatgagaagacggctcggaggaaccaaaactacttggacatcctgcggctgctctcgctgggcgaccggcagctcaatgcctttgacatctctctgcgtttcacacacctcttctggtttggggacctcaactaccgcctggacatggatatccaggagatcctgaactacatcagcaggaaagagtttgagcccctcctcagggtggaccagctcaacctggagcgggagaagcacaaggtcttccttcgattcagtgaggaggagatctccttcccacccacctaccgctatgagcggggttcccgggacacatatgcctggcacaagcagaagccaactggggtccggaccaatgtgccctcatggtgtgaccggattctgtggaaatcctaccctgaaactcacatcatctgcaattcttatggttgcactgatgacatcgtcaccagcgaccattcccccgtgtttgggacatttgaggttggagttacctcccagttcatctccaagaaagggctctcaaagacttcagaccaggcctacattgagtttgagagcatcgaggccattgtgaagacagccagccgcaccaagttcttcatcgagttctactctacctgcctggaggaatacaagaagagctttgagaatgatgcccagagcagtgacaacatcaacttcctcaaagtgcagtggtcttcacgccagctgcccacgctcaaaccaattctggctgatatcgagtacctgcaggaccagcacctcctgctcacagtcaagtccatggatggctatgaatcctatggggagtgtgtggttgcactcaaatccatgatcggcagcacggcccaacagttcctgaccttcctatcccaccgtggcgaggagacaggcaatatcagaggctccatgaaggtgcgggtgcccacggagcgcctgggcacccgtgagcggctctacgagtggatcagcattgataaggatgaggcaggagcaaagagcaaagccccctctgtgtcccgagggagccaggagcccaggtcagggagccgcaagccagccttcacagaggcctcctgcccgctctccaggttatttgaagaaccagagaaaccgccaccaacggggaggcccccagccccaccccgagcagctccccgggaggagcccttgacccccaggttgaagccagagggagctcctgaaccagaaggggtggcggcccccccacccaagaacagcttcaataaccctgcctactacgtccttgaaggggtcccgcaccagctgctgcccccggagccaccctcgcctgccagggcccctgtcccatctgccaccaagaacaaagtggccattacagtgcctgctccacagcttgggcaccaccggcaccctcgtgtgggagaggggagttcttcagatgaggagtctggaggcacactgccccctccagactttccacctccaccactgccggactcagccatcttcctgccccccagcctggatcctttaccagggccagtggtccggggccgtggtggggctgaggcccgtggcccaccacctcccaaggcccatccaaggcctccactgcccccaggcccctcaccagccagcactttcctgggggaagtggccagtggggatgaccggtcctgctcggtgctgcagatggccaagacgctgagcgaggtggactatgcccctgctgggcctgcagcctcagcgctcctcccaggccccctggagctgcagccccccccggggactgccctcggactatggccggcccctcagcttccctccaccccgcatccgggagagcatccaggaagacctggcagaggaggctccgtgcctgcagggcgggcgggccagcgggctgggcgaggcaggcatgagtgcctggctgcgggccatcggcttggagcgctatgaggagggcctggtgcataatggctgggacgacctggagtttctcagtgacatcaccgaggaggacttggaggaggctggggtgcaggacccggctcacaagcgcctccttctggacaccctgcagctcagcaagtgatagcggaggcaccacgaagctgtgaactcagagcccctccctgctaccaaggcccagctatggccccagggttgaaaagttatgagggtcagggcagtatctctctgcctatttattggggtgcctatttattggggatctgcattccccgctgcccaatcatttgcaatgccctaattagggcatcctgcccctcgccttttaggctcaggacggaaggtcagttgccatggttaccgaggaccctggttactctggtgctgtcctgttttactggaccccgcctcccagccccaggggtgcctgtgggggtccatttgggtacgtctgggcccccactttcaccagtttctgcggccttccaccgggcctgaaccacagcggaggagctccgctaagacctccccacccccgctgggggtgggggcgggtgtccgtccggaaatgaaggaatagcccgaggaccgggctggggtttatttaaactgttctgtgtgggtctggggagggagagcaccttaatattattggggttggttggggtggggcaggatctcagccataaagtgccagtttgcttagttctcactgtctcctggtctgtgctgccctgctctggggatgcacggcggcagggtgggggagggaggttcctcgcaggtctcagcccgggacagggtcttgcaagcagcctcctgggcagtcgtaagggttgcggcgtgatgtcttcaataaattaagttttatttggaaaa

SEQ ID NO: 2727 - DNA, 2218 bp, Homo sapiens
tcctacaagcagccggcggcgccgccgagtgaggggacgcggcgcggtggggcggcgcggcccgaggaggcggcggaggaggggccgcccgcggcccccggctcactccggcactccgggccgctcggcccccatgcctgcccgaccgcgctgccggagccccaggtgaccagcgccatgtccagccaggtggtgggcattgagcctctctacatcaaggcagagccggccagccctgacagtccaaagggttcctcggagacagagaccgagcctcctgtggccctggcccctggtccagctcccactcgctgcctcccaggccacaaggaagaggaggatggggagggggctgggcctggcgagcagggcggtgggaagctggtgctcagctccctgcccaagcgcctctgcctggtctgtggggacgtggcctccggctaccactatggtgtggcatcctgtgaggcctgcaaagccttcttcaagaggaccatccaggggagcatcgagtacagctgtccggcctccaacgagtgtgagatcaccaagcggagacgcaaggcctgccaggcctgccgcttcaccaagtgcctgcgggtgggcatgctcaaggagggagtgcgcctggaccgcgtccggggtgggcggcagaagtacaagcggcggccggaggtggacccactgcccttcccgggccccttccctgctgggcccctggcagtcgctggaggcccccggaagacagccccagtgaatgcactggtgtctcatctgctggtggttgagcctgagaagctctatgccatgcctgaccccgcaggccctgatgggcacctcccagccgtggctaccctctgtgacctctttgaccgagagattgtggtcaccatcagctgggccaagagcatcccaggcttctcatcgctgtcgctgtctgaccagatgtcagtactgcagagcgtgtggatggaggtgctggtgctgggtgtggcccagcgctcactgccactgcaggatgagctggccttcgctgaggacttagtcctggatgaagagggggcacgggcagctggcctgggggaactgggggctgccctgctgcaactagtgcggcggctgcaggccctgcggctggagcgagaggagtatgttctactaaaggccttggcccttgccaattcagactctgtgcacatcgaagatgccgaggctgtggagcagctgcgagaagctctgcacgaggccctgctggagtatgaagccggccgggctggccccggagggggtgctgagcggcggcgggcgggcaggctgctgctcacgctaccgctcctccgccagacagcgggcaaagtgctggcccatttctatggggtgaagctggagggcaaggtgcccatgcacaagctgttcttggagatgctcgaggccatgatggactgaggcaaggggtgggactggtgggggttctggcaggacctgcctagcatggggtcagccccaagggctggggcggagctggggtctgggcagtgccacagcctgctggcagggccagggcaatgccatcagcccctgggaacaggccccacgccctctcctccccctcctagggggtgtcagaagctgggaacgtgtgtccaggctctgggcacagtgctgccccttgcaagccataacgtgcccccagagtgtagggggccttgcggaagccatagggggctgcacgggatgcgtgggaggcagaaacctatctcagggagggaaggggatggaggccagagtctcccagtgggtgatgcttttgctgctgcttaatcctaccccctcttcaaagcagagtgggacttggagagcaaaggcccatgcccccttcgctcctcctctcatcatttgcattgggcattagtgtccccccttgaagcaataactccaagcagactccagcccctggacccctggggtggccagggcttccccatcagctcccaacgagcctcctcagggggtaggagagcactgcctctatgccctgcagagcaataacactatatttatttttgggtttggccagggaggcgcagggacatggggcaagccagggcccagagcccttggctgtacagagactctattttaatgtatatttgctgcaaagagaaaccgcttttggttttaaacctttaatgagaaaaaaatatataataccgagctc

SEQ ID NO: 2728 - DNA, 13500 bp, Homo sapiens; identical to SEQ ID NO: 1212
  misc_feature (1)..(13500): n=a,t,g or c

SEQ ID NO: 2729 - DNA, 2156 bp, Homo sapiens
cgggcccgttgcaagatggcggcggccatgctgggccccggggctgtgtgtgcgcagcgggcggcggcgcggcccggaaggctggcgcggcgacggcgttagcccggccctcggcccctctttgcggccgctccctccgcctattccctccttgctcgagatggatctgcccgtgggccccggcgcggcggggcccagcaacgtcccggccttcctgaccaagctgtggaccctcgtgagcgacccggacaccgacgcgctcatctgctggagcccgagcgggaacagcttccacgtgttcgaccagggccagtttgccaaggaggtgctgcccaagtacttcaagcacaacaacatggccagcttcgtgcggcagctcaacatgtatggcttccggaaagtggtccacatcgagcagggcggcctggtcaagccagagagagacgacacggagttccagcacccatgcttcctgcgtggccaggagcagctccttgagaacatcaagaggaaagtgaccagtgtgtccaccctgaagagtgaagacataaagatccgccaggacagcgtcaccaagctgctgacggacgtgcagctgatgaaggggaagcaggagtgcatggactccaagctcctggccatgaagcatgagaatgaggctctgtggcgggaggtggccagccttcggcagaagcatgcccagcaacagaaagtcgtcaacaagctcattcagttcctgatctcactggtgcagtcaaaccggatcctgggggtgaagagaaagatccccctgatgctgaacgacagtggctcagcacattccatgcccaagtatagccggcagttctccctggagcacgtccacggctcgggcccctactcggccccctccccagcctacagcagctccagcctctacgcccctgatgctgtggccagctctggacccatcatctccgacatcaccgagctggctcctgccagccccatggcctcccccggcgggagcatagacgagaggcccctatccagcagccccctggtgcgtgtcaaggaggagccccccagcccgcctcagagcccccgggtagaggaggcgagtcccgggcgcccatcttccgtggacaccctcttgtccccgaccgccctcattgactccatcctgcgggagagtgaacctgcccccgcctccgtcacagccctcacggacgccaggggccacacggacaccgagggccggcctccctcccccccgcccacctccacccctgaaaagtgcctcagcgtagcctgcctggacaagaatgagctcagtgaccacttggatgctatggactccaacctggataacctgcagaccatgctgagcagccacggcttcagcgtggacaccagtgccctgctggacctgttcagcccctcggtgaccgtgcccgacatgagcctgcctgaccttgacagcagcctggccagtatccaagagctcctgtctccccaggagccccccaggcctcccgaggcagagaacagcagcccggattcagggaagcagctggtgcactacacagcgcagccgctgttcctgctggaccccggctccgtggacaccgggagcaacgacctgccggtgctgtttgagctgggagagggctcctacttctccgaaggggacggcttcgccgaggaccccaccatctccctgctgacaggctcggagcctcccaaagccaaggaccccactgtctcctagaggccccggaggagctgggccagccgcccacccccacccccagtgcagggctggtcttggggaggcagggcagcctcgcggtcttgggcactggtgggtcggccgccatagccccagtaggacaaacgggctcgggtctgggcagcacctctggtcaggagggtcaccctggcctgccagtctgccttcccccaaccccgtgtcctgtggtttggttggggcttcacagccacacctggactgaccctgcaggttgttcatagtcagaattgtattttggatttttacacaactgtcccgttccccgctccacagagatacacagatatatacacacagtggatggacggacaagacaggcagagatctataaacagacaggctctaaaaaaaaaaaaaaaaaaaa

SEQ ID NO: 2730 - DNA, 1731 bp, Homo sapiens
atcgtacggatctgaattcggaaaaagaaacaaaaaaagaagaaagaaaaaggcagtgagacagattcagcccaggatcagcctgtgaagatgaactctttgccagcagagaggatccaggaaatacagaaggccattgagctgttctcagtgggtcagggacctgccaaaaccatggaggaggctagcaagcgaagctaccagttctgggatacgcagcccgtccccaagctgggcgaagtggtgaacacccatggccccgtggagcctgacaaggacaatatccgccaggagccctacaccctgccccagggcttcacctgggatgctttggacctgggcgatcgtggtgtgctaaaagaactgtacaccctcctgaatgagaactatgtggaagatgatgacaacatgttccgatttgattattccccggagtttcttttgtgggctctccggccacccggctggctcccccagtggcactgtggggttcgagtggtctcaagtcggaaattggttgggttcattagcgccatcccagcaaacatccatatctatgacacagagaagaagatggtagagatcaacttcctgtgtgtccacaagaagctgcgttccaagagggttgctccagttctgatccgagagatcaccaggcgggttcacctggagggcatcttccaagcagtttacactgccggggtggtactaccaaagcctgttggcacctgcaggtattggcatcggtccctaaacccacggaagctgattgaagtgaagttctcccacctgagcagaaatatgaccatgcagcgcaccatgaagctctaccgactgccagagactcccaagacagctgggctgcgaccaatggaaacaaaggacattccagtagtgcaccagctcctcaccaggtacttgaagcaatttcaccttacgcccgtcatgagccaggaggaggtggagcactggttctacccccaggagaatatcatcgacactttcgtggtggagaacgcaaacggagaggtgacagatttcctgagcttttatacgctgccctccaccatcatgaaccatccaacccacaagagtctcaaagctgcttattctttctacaacgttcacacccagacccctcttctagacctcatgagcgacgcccttgtcctcgccaaaatgaaagggtttgatgtgttcaatgcactggatctcatggagaacaaaaccttcctggagaagctcaagtttggcataggggacggcaacctgcagtattacctttacaattggaaatgccccagcatgggggcagagaaggttggactggtgctacaataaccagtcaccagtgcgattctagataaagccactgaaaattcgaaccaggaaatggaaccccaccactgttggtccaattttcacacacgtgagaatccctggcaaagggagcagaactgaaccggctttaccaaaccgccagcgaacttgacaattgtattgcgatggcgtgggctgcgtgacgtcacctccggtcgtgtctctggtctccgtgttttccagttaattacatcctcatgcagccgtgatcaagggaatgtaactgctgaaaactagctcgtgattggcatataatggagttaacgggtgaataataaaagtatatatatatattatatatataaaaaaaaaaaaaaaaaaaaaaaccgtctacaaagcggccgcagatcc

SEQ ID NO: 2731 - DNA, 3505 bp, Homo sapiens; identical to SEQ ID NO: 2427

SEQ ID NO: 2732 - DNA, 1648 bp, Homo sapiens
gccttttttgcagtctcaggacgggcgctttggagccggccccaggcagcgtgtgtcggtcgcctagtctggagaactagtcctcgactcacggtgagggaatggaccgacacgggtattgtaccgctgagggaaaggagcgggactccggacctccaggagtgcaaggatgatgctgaaaggaataacaaggcttatctctaggatccataagttggaccctgggcgttttttacacatggggacccaggctcgccaaagcattgctgctcacctagataaccaggttccagttgagagtccgagagctatttcccgcaccaatgagaatgacccggccaagcatggggatcagcacgagggtcagcactacaacatctccccccaggatttggagactgtatttccccatggccttcctcctcgctttgtgatgcaggtgaagacattcagtgaagcttgcctgatggtaaggaaaccagccctagaacttctgcattacctgaaaaacaccagttttgcttatccagctatacgatatcttctgtatggagagaagggaacaggaaaaaccctaagtctttgccatgttattcatttctgtgcaaaacaggactggctgatactacatattccagatgctcatctttgggtgaaaaattgtcgggatcttctgcagtccagctacaacaaacagcgctttgatcaacctttagaggcttcaacctggctgaagaatttcaaaactacaaatgagcgcttcctgaaccagataaaagttcaagagaagtatgtctggaataagagagaaagcactgagaaagggagtcctctgggagaagtggttgaacagggcataacacgggtgaggaacgccacagatgcagttggaattgtgctgaaagagctaaagaggcaaagttctttgggtatgtttcacctcctagtggccgtggatggaatcaatgctctttggggaagaaccactctgaaaagagaagataaaagcccgattgcccccgaggaattagcacttgttcacaacttgaggaaaatgatgaaaaatgattggcatggaggcgccattgtgtcggctttgagccagactgggtctctctttaagccccggaaagcctatctgccccaggagttgctgggaaaggaaggatttgatgccctggatccctttattcccatcctggtttccaactatacccaaaggaatttgaaagttgtattcagtattatttggaaaacaattggcttcaacatgagaaagctcctacagaagaagggaaaaaagagctgctgttcctaagtaacgcgaacccctcgctgctggagcggcactgtgcctacctctaagccaagatcacagcatgtgaggaagacagtggacatctgctttatgctggacccagtaagatgaggaagtcgggatgacacaggaagaggagccaggcccttgtacctatgggattggacaggactgcagttggctctggacctgcattaaaatgggtttcactgtgaatgcgtgacaataagatattcccttgttcctaaaactttatatcagtttattggatgtggtttttcacatttaagataattatggctcttttcctaaaaaataaaatatctttct

SEQ ID NO: 2733 - DNA, 1584 bp, Homo sapiens; identical to SEQ ID NO: 1224

SEQ ID NO: 2734 - DNA, 1222 bp, Homo sapiens
ccgaacgcccgcagcagggtcagaagggaggtggccggtctccgtcgtgacctctgacggtttctgagcgttggcctttggcacgcgctacacccttttgctttggttctgccatgccgatgtaccaggtaaagccctatcacgggggcggcgcgcctctccgtgtggagcttcccacctgcatgtaccggctccccaacgtgcacggcaggagctacggcccagcgccgggcgctggccacgtgcaggaagagtctaacctgtctctgcaagctcttgagtcccgccaagatgatattttaaaacgtctgtatgagttgaaagctgcagttgatggcctctccaagatgattcaaacaccagatgcagacttggatgtaaccaacataatccaagcggatgagcccacgactttaaccaccaatgcgctggacttgaattcagtgcttgggaaggattacggggcgctgaaagacatcgtgatcaacgcaaacccggcctcccctcccctctccctgcttgtgctgcacaggctgctctgtgagcacttcagggtcctgtccacggtgcacacgcactcctcggtcaagagcgtgcctgaaaaccttctcaagtgctttggagaacagaataaaaaacagccccgccaagactatcagctgggattcactttaatttggaagaatgtgccgaagacgcagatgaaattcagcatccagacgatgtgccccatcgaaggcgaagggaacattgcacgtttcttgttctctctgtttggccagaagcataatgctgtcaacgcaacccttatagatagctgggtagatattgcgatttttcagttaaaagagggaagcagtaaagaaaaagccgctgttttccgctccatgaactctgctcttgggaagagcccttggctcgctgggaatgaactcaccgtagcagacgtggtgctgtggtctgtactccagcagatcggaggctgcagtgtgacagtgccagccaatgtgcagaggtggatgaggtcttgtgaaaacctggctcctttttaacacggccctcaagctccttaagtgaattgccgtaactgattttaaagggtttagattttaagaatggtgctctttcatgcctattatcagtaaggggacttgtattagagtcagagtctttttatttaggccagttgtcaagtgtcaataaaagcgcatcatgtaattta

SEQ ID NO: 2735 - DNA, 1040 bp, Homo sapiens
aacacatttcatctgggcttcttaaatctaaatctttaaaatgactaagttttcttccttttctctgtttttcctaatagttggggcttatatgactcatgtgtgtttcaatatggaaattattggagggaaagaagtgtcacctcattccaggccatttatggcctccatccagtatggcggacatcacgtttgtggaggtgttctgattgatccacagtgggtgctgacagcagcccactgccaatatcggtttaccaaaggccagtctcccactgtggttttaggcgcacactctctctcaaagaatgaggcctccaaacaaacactggagatcaaaaaatttataccattctcaagagttacatcagatcctcaatcaaatgatatcatgctggttaagcttcaaacagccgcaaaactcaataaacatgtcaagatgctccacataagatccaaaacctctcttagatctggaaccaaatgcaaggttactggctggggagccaccgatccagattcattaagaccttctgacaccctgcgagaagtcactgttactgtcctaagtcgaaaactttgcaacagccaaagttactacaacggcgacccttttatcaccaaagacatggtctgtgcaggagatgccaaaggccagaaggattcctgtaagggtgactcagggggccccttgatctgtaaaggtgtcttccacgctatagtctctggaggtcatgaatgtggtgttgccacaaagcctggaatctacaccctgttaaccaagaaataccagacttggatcaaaagcaaccttgtcccgcctcatacaaattaagttacaaataattttattggatgcacttgcttcttttttcctaatatgctcgcaggttagagttgggtgtaagtaaagcagagcacatatggggtccatttttgcacttgtaagtcattttattaaggaatcaagttctttttcacttgtatcactgatgtatttctaccatgctggttttattctaaataaaatttagaagact

SEQ ID NO: 2736 - DNA, 1052 bp, Homo sapiens
cgcggaggctgcacggagagcggtgcccgcgtcagtgaccgaaggaagagaccaagatgaatacagagcccgagaggaagtttggcgtggtggtggttggtgttggccgagccggctccgtgcggatgagggacttgcggaatccacacccttcctcagcgttcctgaacctgattggcttcgtgtcgagaagggagctcgggagcattgatggagtccagcagatttctttggaggatgctctttccagccaagaggtggaggtcgcctatatctgcagtgagagctccagccatgaggactacatcaggcagttccttaatgctggcaagcacgtccttgtggaataccccatgacactgtcattggcggccgctcaggaactgtgggagctggctgagcagaaaggaaaagtcttgcacgaggagcatgttgaactcttgatggaggaattcgctttcctgaaaaaagaagtggtggggaaagacctgctgaaagggtcgctcctcttcacagctggcccgttggaagaagagcggtttggcttccctgcattcagcggcatctctcgcctgacctggctggtctccctctttggggagctttctcttgtgtctgccactttggaagagcgaaaggaagatcagtatatgaaaatgacagtgtgtctggagacagagaagaaaagtccactgtcatggattgaagaaaaaggacctggtctaaaacgaaacagatatttaagcttccatttcaagtctgggtccttggagaatgtgccaaatgtaggagtgaataagaacatatttctgaaagatcaaaatatatttgtccagaaactcttgggccagttctctgagaaggaactggctgctgaaaagaaacgcatcctgcactgcctggggcttgcagaagaaatccagaaatattgctgttcaaggaagtaagaggaggaggtgatgtagcacttccaagatggcaccagcatttggttcttctcaagagttgaccattatctctattcttaaaattaaacatgttggggaaacaag

SEQ ID NO: 2737 - DNA, 2655 bp, Homo sapiens
cggcgtgcgcggacgggcagccagcagcggaggcgcggcgcagcacacccggggaccatgggctccatgttccggagcgaggaggtggccctggtccagctctttctgcccacagcggctgcctacacctgcgtgagtcggctgggcgagctgggcctcgtggagttcagagacctcaacgcctcggtgagcgccttccagagacgctttgtggttgatgtttggcgctgtgaggagctggagaagaccttcaccttcctgcaggaggaggtgcggcgggctgggctggtcctgcccccgccaaaggggaggctgccggcacccccaccccgggacctgctgcgcatccaggaggagacggagcgcctggcccaggagctgcgggatgtgcggggcaaccagcaggccctgcgggcccagctgcaccagctgcagctccacgccgccgtgctacgccagggccatgaacctcagctggcagccgcccacacagatggggcctcagagaggacgcccctgctccaggcccccggggggccgcaccaggacctgagggtcaactttgtggcaggtgccgtggagccccacaaggcccctgccctagagcgcctgctctggagggcctgccgcggcttcctcattgccagcttcagggagctggagcagccgctggagcaccccgtgacgggcgagccagccacgtggatgaccttcctcatctcctactggggtgagcagatcggacagaagatccgcaagatcacggactgcttccactgccacgtcttcccgtttctgcagcaggaggaggcccgcctcggggccctgcagcagctgcaacagcagagccaggagctgcaggaggtcctcggggagacagagcggttcctgagccaggtgctaggccgggtgctgcagctgctgccgccagggcaggtgcaggtccacaagatgaaggccgtgtacctggccctgaaccagtgcagcgtgagcaccacgcacaagtgcctcattgccgaggcctggtgctctgtgcgagacctgcccgccctgcaggaggccctgcgggacagctcgatggaggagggagtgagtgccgtggctcaccgcatcccctgccgggacatgccccccacactcatccgcaccaaccgcttcacggccagcttccagggcatcgtggatcgctacggcgtgggccgctaccaggaggtcaaccccgctccctacaccatcatcaccttccccttcctgtttgctgtgatgttcggggatgtgggccacgggctgctcatgttcctcttcgccctggccatggtccttgcggagaaccgaccggctgtgaaagccgcgcagaacgagatctggcagactttcttcaggggccgctacctgctcctgcttatgggcctgttctccatctacaccggcttcatctacaacgagtgcttcagtcgcgccaccagcatcttcccctcgggctggagtgtggccgccatggccaaccagtctggctggagtgatgcattcctggcccagcacacgatgcttaccctggatcccaacgtcaccggtgtcttcctgggaccctacccctttggcatcgatcctatttggagcctggctgccaaccacttgagcttcctcaactccttcaagatgaagatgtccgtcatcctgggcgtcgtgcacatggcctttggggtggtcctcggagtcttcaaccacgtgcactttggccagaggcaccggctgctgctggagacgctgccggagctcaccttcctgctgggactcttcggttacctcgtgttcctagtcatctacaagtggctgtgtgtctgggctgccagggccgcctcgcccagcatcctcatccacttcatcaacatgttcctcttctcccacagccccagcaacaggctgctctacccccggcaggaggtggtccaggccacgctggtggtcctggccttggccatggtgcccatcctgctgcttggcacacccctgcacctgctgcaccgccaccgccgccgcctgcggaggaggcccgctgaccgacaggaggaaaacaaggccgggttgctggacctgcctgacgcatctgtgaatggctggagctccgatgaggaaaaggcagggggcctggatgatgaagaggaggccgagctcgtcccctccgaggtgctcatgcaccaggccatccacaccatcgagttctgcctgggctgcgtctccaacaccgcctcctacctgcgcctgtgggccctgagcctggcccacgcccagctgtccgaggttctgtgggccatggtgatgcgcataggcctgggcctgggccgggaggtgggcgtggcggctgtggtgctggtccccatctttgccgcctttgccgtgatgaccgtggctatcctgctggtgatggagggactctcagccttcctgcacgccctgcggctgcactgggtggaattccagaacaagttctactcaggcacgggctacaagctgagtcccttcaccttcgctgccacagatgactagggcccactgcaggtcctgccagacctccttcctgacctctgaggcaggagaggaataaagacggtccgccctggcaaaaaaaaaaaaaaaaaaaaaaaaaaaaaaaaa

SEQ ID NO: 2738 - DNA, 8210 bp, Homo sapiens
gcctccacacggctccgtcgggcgccgcgctcttccggcagcggtagctttggagacgccgggaacccgcgttggcgtggttgactagtgcctcgcagcctcagcatgggggaacatggcctggagctggcttccatgatccccgccctgcgggagctgggcagtgccacaccagaggaatataatacagttgtacagaagccaagacaaattctgtgtcaattcattgaccggatacttacagatgtaaatgttgttgctgtagaacttgtaaagaaaactgactctcagccaacctccgtgatgttgcttgatttcatccagcatatcatgaaatcctccccacttatgtttgtaaatgtgagtggaagccatgaggccaaaggcagttgtattgaattcagtaattggatcataacgagacttctgcggattgcagcaactccctcctgtcatttgttacacaagaaaatctgtgaagtcatctgttcattattatttctttttaaaagcaagagtcctgctatttttggggtactcacaaaagaattattacaactttttgaagacttggtttacctccatagaagaaatgtgatgggtcatgctgtggaatggccagtggtcatgagccgatttttaagtcaattagatgaacacatgggatatttacaatcagctcctttgcagttgatgagtatgcaaaatttagaatttattgaagtcactttattaatggttcttactcgtattattgcaattgtgttttttagaaggcaagaactcttactttggcagataggttgtgttctgctagagtatggtagtccaaaaattaaatccctagcaattagctttttaacagaactttttcagcttggaggactaccagcacaaccagctagcacttttttcagctcatttttggaattattaaaacaccttgtagaaatggatactgaccaattgaaactctatgaagagccattatcaaagctgataaagacactatttccctttgaagcagaagcttatagaaatattgaacctgtctatttaaatatgctgctggaaaaactctgtgtcatgtttgaagacggtgtgctcatgcggcttaagtctgatttgctaaaagcagctttgtgccatttactgcagtatttccttaaatttgtgccagctgggtatgaatctgctttacaagtcaggaaggtctatgtgagaaatatttgtaaagctcttttggatgtgcttggaattgaggtagatgcagagtacttgttgggcccactttatgcagctttgaaaatggaaagtatggaaatcattgaggagattcaatgccaaactcaacaggaaaacctcagcagtaatagtgatggaatatcacccaaaaggcgtcgtctcagctcgtctctaaacccttctaaaagagcaccaaaacagactgaggaaattaaacatgtggacatgaaccaaaagagcatattatggagtgcactgaaacagaaagctgaatcccttcagatttcccttgaatacagtggcctaaagaatcctgttattgagatgttagaaggaattgctgttgtcttacaactgactgctctgtgtactgttcattgttctcatcaaaacatgaactgccgtactttcaaggactgtcaacataaatccaagaagaaaccttctgtagtgataacttggatgtcattggatttttacacaaaagtgcttaagagctgtagaagtttgttagaatctgttcagaaactggacctggaggcaaccattgataaggtggtgaaaatttatgatgctttgatttatatgcaagtaaacagttcatttgaagatcatatcctggaagatttatgtggtatgctctcacttccatggatttattcccattctgatgatggctgtttaaagttgaccacatttgccgctaatcttctaacattaagctgtaggatttcagatagctattcaccacaggcacaatcacgatgtgtgtttcttctgactctgtttccaagaagaatattccttgagtggagaacagcagtttacaactgggccctgcagagctcccatgaagtaatccgggctagttgtgttagtggattttttatcttattgcagcagcagaattcttgtaacagagttcccaagattcttatagataaagtcaaagatgattctgacattgtcaagaaagaatttgcttctatacttggtcaacttgtctgtactcttcacggcatgttttatctgacaagttctttaacagaacctttctctgaacacggacatgtggacctcttctgtaggaacttgaaagccacttctcaacatgaatgttcatcttctcaactaaaagcttctgtctgcaagccattccttttcctactgaaaaaaaaaatacctagtccagtaaaacttgctttcatagataatctacatcatctttgtaagcatcttgattttagagaagatgaaacagatgtaaaagcagttcttggaactttattaaatttaatggaagatccagacaaagatgttagagtggcttttagtggaaatatcaagcacatattggaatccttggactctgaagatggatttataaaggagctttttgtcttaagaatgaaggaagcatatacacatgcccaaatatcaagaaataatgagctgaaggataccttgattcttacaacaggggatattggaagggccgcaaaaggagatttggtaccatttgcactcttacacttattgcattgtttgttatccaagtcagcatctgtctctggagcagcatacacagaaattagagctctggttgcagctaaaagtgttaaactgcaaagttttttcagccagtataagaaacccatctgtcagtttttggtagaatcccttcactctagtcagatgacagcacttccgaatactccatgccagaatgctgacgtgcgaaaacaagatgtggctcaccagagagaaatggctttaaatacgttgtctgaaattgccaacgttttcgactttcctgatcttaatcgttttcttactaggacattacaagttctactacctgatcttgctgccaaagcaagccctgcagcttctgctctcattcgaactttaggaaaacaattaaatgtcaatcgtagagagattttaataaacaacttcaaatatattttttctcatttggtctgttcttgttccaaagatgaattagaacgtgcccttcattatctgaagaatgaaacagaaattgaactggggagcctgttgagacaagatttccaaggattgcataatgaattattgctgcgtattggagaacactatcaacaggtttttaatggtttgtcaatacttgcctcatttgcatccagtgatgatccatatcagggcccgagagatatcatatcacctgaactgatggctgattatttacaacccaaattgttgggcattttggctttttttaacatgcagttactgagctctagtgttggcattgaagataagaaaatggccttgaacagtttgatgtctttgatgaagttaatgggacccaaacatgtcagttctgtgagggtgaagatgatgaccacactgagaactggccttcgattcaaggatgattttcctgaattgtgttgcagagcttgggactgctttgttcgctgcctggatcatgcttgtctgggctcccttctcagtcatgtaatagtagctttgttacctcttatacacatccagcctaaagaaactgcagctatcttccactacctcataattgaaaacagggatgctgtgcaagattttcttcatgaaatatattttttacctgatcatccagaattaaaaaagataaaagccgttctccaggaatacagaaaggagacctctgagagcactgatcttcagacaactcttcagctctctatgaaggccattcaacatgaaaatgtcgatgttcgtattcatgctcttacaagcttgaaggaaaccttgtataaaaatcaggaaaaactgataaagtatgcaacagacagtgaaacagtagaacctattatctcacagttggtgacagtgcttttgaaaggttgccaagatgcaaactctcaagctcggttgctctgtggggaatgtttaggggaattgggggcgatagatccaggtcgattagatttctcaacaactgaaactcaaggaaaagattttacatttgtgactggagtagaagattcaagctttgcctatggattattgatggagctaacaagagcttaccttgcgtacgctgataatagccgagctcaagattcagctgcctatgccattcaggagttgctttctatttatgactgtagagagatggagaccaacggcccaggtcaccaattgtggaggagatttcctgagcatgttcgggaaatactagaacctcatctaaataccagatacaagagttctcagaagtcaaccgattggtctggagtaaagaagccaatttacttaagtaaattgggtagtaactttgcagaatggtcagcatcttgggcaggttatcttattacaaaggttcgacatgatcttgccagtaaaattttcacctgctgtagcattatgatgaagcatgatttcaaagtgaccatctatcttcttccacatattctggtgtatgtcttactgggttgtaatcaagaagatcagcaggaggtttatgcagaaattatggcagttctaaagcatgacgatcagcataccataaatacccaagacattgcatctgatctgtgtcaactcagtacacagactgtgttctccatgcttgaccatctcacacagtgggcaaggcacaaatttcaggcactgaaagctgagaaatgtccacacagcaaatcaaacagaaataaggtagactcaatggtatctactgtggattatgaagactatcagagtgtaacccgttttctagacctcataccccaggatactctggcagtagcttcctttcgctccaaagcatacacacgagctgtaatgcactttgaatcatttattacagaaaagaagcaaaatattcaggaacatcttggatttttacagaaattgtatgctgctatgcatgaacctgatggagtggccggagtcagtgcaattagaaaggcagaaccatctctaaaagaacagatccttgaacatgaaagccttggcttgctgagggatgccactgcttgttatgacagggctattcagctagaaccagaccagatcattcattatcatggtgtagtaaagtccatgttaggtcttggtcagctgtctactgttatcactcaggtgaatggagtgcatgctaacaggtccgagtggacagatgaattaaacacgtacagagtggaagcagcttggaaattgtcacagtgggatttggtggaaaactatttggcagcagatggaaaatctacaacatggagtgtcagactgggacagctattattatcagccaaaaaaagagatatcacagctttttatgactcactgaaactagtgagagcagaacaaattgtacctctttcagctgcaagctttgaaagaggctcctaccaacgaggatatgaatatattgtgagattgcacatgttatgtgagttggagcatagcatcaaaccacttttccagcattctccaggtgacagttctcaagaagattctctaaactgggtagctcgactagaaatgacccagaattcctacagagccaaggagcctatcctggctctccggagggctttactaagcctcaacaaaagaccagattacaatgaaatggttggagaatgctggctgcagagtgccagggtagctagaaaggctggtcaccaccagacagcctacaatgctctccttaatgcaggggaatcacgactcgctgaactgtacgtggaaagggcaaagtggctctggtccaagggtgatgttcaccaggcactaattgttcttcaaaaaggtgttgaattatgttttcctgaaaatgaaaccccacctgagggtaagaacatgttaatccatggtcgagctatgctactagtgggccgatttatggaagaaacagctaactttgaaagcaatgcaattatgaaaaaatataaggatgtgaccgcgtgcctgccagaatgggaggatgggcatttttaccttgccaagtactatgacaaattgatgcccatggtcacagacaacaaaatggaaaagcaaggtgatctcatccggtatatagttcttcattttggcagatctctacaatatggaaatcagttcatatatcagtcaatgccacgaatgttaactctatggcttgattatggtacaaaggcatatgaatgggaaaaagctggccgctccgatcgtgtacaaatgaggaatgatttgggtaaaataaacaaggttatcacagagcatacaaactatttagctccatatcaatttttgactgctttttcacaattgatctctcgaatttgtcattctcacgatgaagtttttgttgtcttgatggaaataatagccaaagtatttctagcctatcctcaacaagcaatgtggatgatgacagctgtgtcaaagtcatcttatcccatgcgtgtgaacagatgcaaggaaatcctcaataaagctattcatatgaaaaaatccttagagaagtttgttggagatgcaactcgcctaacagataagcttctagaattgtgcaataaaccggttgatggaagtagttccacattaagcatgagcactcattttaaaatgcttaaaaagctggtagaagaagcaacatttagtgaaatcctcattcctctacaatcagtcatgatacctacacttccatcaattctgggtacccatgctaaccatgctagccatgaaccatttcctggacattgggcctatattgcagggtttgatgatatggtggaaattcttgcttctcttcagaaaccaaagaagatttctttaaaaggctcagatggaaagttctacatcatgatgtgtaagccaaaagatgacctgagaaaggattgtagactaatggaattcaattccttgattaataagtgcttaagaaaagatgcagagtctcgtagaagagaacttcatattcgaacatatgcagttattccactaaatgatgaatgtgggattattgaatgggtgaacaacactgctggtttgagacctattctgaccaaactatataaagaaaagggagtgtatatgacaggaaaagaacttcgccagtgtatgctaccaaagtcagcagctttatctgaaaaactcaaagtattccgagaatttctcctgcccaggcatcctcctatttttcatgagtggtttctgagaacattccctgatcctacatcatggtacagtagtagatcagcttactgccgttccactgcagtaatgtcaatggttggttatattctggggcttggagaccgtcatggtgaaaatattctctttgattctttgactggtgaatgcgtacatgtagatttcaattgtcttttcaataagggagaaacctttgaagttccagaaattgtgccatttcgcctgactcataatatggttaatggaatgggtcctatgggaacagagggtctttttcgaagagcatgtgaagttacaatgaggctgatgcgtgatcagcgagagcctttaatgagtgtcttaaagacttttctacatgatcctcttgtggaatggagtaaaccagtgaaagggcattccaaagcgccactgaatgaaactggagaagttgtcaatgaaaaggccaagacccatgttcttgacattgagcagcgactacaaggtgtaatcaagactcgaaatagagtgacaggactgccgttatctattgaaggacatgtgcattaccttatacaggaagctactgatgaaaacttactatgccagatgtatcttggttggactccatatatgtgaaatgaaattatgtaaaagaatatgttaataatctaaaagtaatgcatttggtatgaatctgtggttgtatctgttcaattctaaagtacaacataaatttacgttctcagcaactgttatttctctctgatcattaattatatgtaaaataatatacattcactcgtgcc

SEQ ID NO: 2739 - DNA, 1867 bp, Homo sapiens
gaagctcccaactcgccggcctggccacgggatggcccccaaattcccagactctgtggaggagctccgcgccgccggcaatgagagtttccgcaacggccagtacgccgaggcctccgcgctctacggccgcgcgctgcgggtgctgcaggcgcaaggttcttcagacccagaagaagaaagtgttctctactccaaccgagcagcatgtcactggaagaatggaaactgcagagactgcatcaaagattgcacttcagcactggccttggttcccttcagcattaagcccctgctgcggcgagcatctgcttatgaggctctggagaagtaccctatggcctatgttgactataagactgtgctgcagattgatgataatgtgacgtcagccgtagaaggcatcaacagaatgaccagagctctcatggactcgcttgggcctgagtggcgcctgaagctgccctcattccccttggtgcctgtgtcagctcagaagaggtggaatttcttgccttcggagaaccacaaagagatggctaaaagcaaatccaaagaaaccacagctacaaagaacagagtgccttctgctggggatgtggagaaagccagagttctgaaggaagaaggcaatgagcttgtaaagaagggaaaccataagaaagctattgagaagtacagtgaaagcctcttgtgtagtaacctggaatctgccacgtacagcaacagagcactctgctatttggtcctgaagcagtacacagaagcagtgaaggactgcacagaagccctcaagctggatggaaagaacgtgaaggcattctacagacgggctcaagcccacaaagcactcaaggactataaatccagctttgcagacatcagcaacctcctacagattgagcctaggaatggtcctgcacagaagttgcggcaggaagtgaagcagaacctacactaaaaacccaacagggcaactggaacccctgcctgaccttacccagagaagccatgggccacctgctctgtgcccgctcctgaaacccagcatgccccaagtgagctctgaagccccctcctcaatcccttgatggcctcccaccctgtaagaggctttgcttgttcaaattaaactcagtgtagtcaaacacagacatggttgttgcaccagaaaggtccccactagagctaagcgtgaagctgaagctctgtccctattcccccagcccagctagctgatcacaccaacagatcctcatcagcaaagcatttggctttgtcctgcccaagtgggctgcagactgagtgctgcccttgtagcttccccagaccccaactcactgcagttcatctgaacaacctgagctcctgggccggggtggaaggagggggataaacctaaggccctgatccaaagcagcctgttgagctggttctccagggctgcagtctctccaggtgtacagctgtccctgccctgtcctgtccttgcacagtctcctatgtctgagccccagtgccttctgttcgggccctcctttggtgggaaaggcagagccctgacccttgaatggttgtccttgactctgtgctgctgccttctgcagagaggcacctaagctgtttaaagagcccagtgattgtggctgctcctcctagaggtgggagggggcaagaggcctccttggtcagtgtccatgctttctgggcagggacttggttttttgttccaacagtggccttctccgggcttcatagttctttgtaatatgttgaagttaatttgaattgactgattttgttgaactgtgtgtttaagctgttgcattaaaaagctttcttctacatcaaaaaaaaaaaaaaaaaa

SEQ ID NO: 2740 - DNA, 167343 bp, Homo sapiens
atctaccatgatcaagtgggcttcatccctgggatgcaaggctggttcaatatacgcaaatcaagaaatgtaatccagcatataaacagaaccaaagacaaaaaccacatgattatctcaatagatgcagaaaaggcctttgacaaaattcaacaacccttcatgctaaaaactctcaataaattaggcattgatgggacgtatctcaaaataataagagctatctatgacaaacccacagccaatatcatactgaatgggcaaaaactggaagcattccctttgaaaactggcacaagacagggatgccctctctcaccactcctattcaacatagtgttggaagttctggccagggcaattaggcaggagaaggaaataaagggtattcaattaggaaaagaggaagtcaaattgtccctgtttgcagacgacatgattgtatatctagaaaaccccattgtctcagcccaaaatctccttaagctgataagcaacttcagcaaagtctcaggatacaaaatcaatgtacaaaaatcacaagcattcttatacaccaataacagacaaacagccaaatcatgagtgaactcccattcacaattgcttcaaagagaataaaatacctaggaatccaacttacaagggatgtgaaggacctcttcaaggagaactacaaacaactgctcaatgaaataaaagagggtacaaacaaatggaagaacattccatgctcatgggtaggaagaatcagtatcgttaaaatggccacactgcccaaggtaatttatagattcaatgccatccccatcaagctaccaatgactttcttcacagaattggaaaaaactactttaaagttcatatggaaccaaaaaagagcccacatcaccaagtcagtcctaagccaaaagaacaaagctggaggcatcacgctacctgacttcaaactatactgcaaggctacagtaaccaaaacagcatgttactggtaccaaaacagagatatagatcaatggaacacaacagagccctcagaaataacgccacatatctacaactatctgatctttgacaaacctgagaaaaacaagcaatggggaaaggattccctatttaataaatggtgctgggaaaactggctagccatatggagaaagctgaaactggatcccttccttacaccttatataaaaattaattcaagatggattaaagacttaaacgttagacctaaaaccataaaaaccctagaagaaaacctaggcattaccattcaggacataggcatgggcaaggacttcatgtctaaaacaccaaaagcaatggcaayaaaagccaaaattgacaaatgggatctaattaaactaaagagcttctgcacagcaaaagaaactaccatcagagtgaacaggcaacctacaaaatgggagaaaattttcgcaacctactcatctgacaaagggctaatatccagaatctacaatgaactcaaacaartttacaagaaaaaaacaaacaaccccatcaaaaagtgggcaaaggacatgaacagacacttctcaaaagaagacatttatgcagccaaaaaacacatgaaaaaatgctcaccatcactggccatcagagaaatgcaaatgaaaacyacaatgagataccayctyacaccagttagaatggcaatcattaaaaagtcaggaaacaacaggtgctggagaggatgtggagaaataggaacacttttacactgttggtgggactgtaaactagttcaaccattgtggaagtcagtgtggcgattcctcagggatctagaactagaaataccatttgacccagccatcccattactgggtatatacccaaaggactataartcatgctgctataargacacatgcacacgtatgtttattscggcactattcacaatagcaaagacttggaaccaacccaaatgtccaacaatgatagactggattaagaaaatgtgkcacatatacaccatggaatactatgcagccataaaaaatgatgarttcatgtcctttgtagggacatggacgaaattggaaatcatcattcacagtaaactatcgcaagaacaaaaaaaccaaacaccgcatattctcactcataggtgggaattgaacaatgagaacatatggacacaggaaggggaacatcacactctggggactgttgtgggtkgggggaggggggmgggacagctttaggggacatacctaatgctaaatgacgagttaatgggtgcagcacaccagcatggcacatgtatacatatgtaactaacctgcacattgtgcacatgtaccctaaaacttaaagtataataataataaaatttttaaaaaaggaaaaaaaaaagaaagtcagttttgctagatatatagtccttggcatgcattttctttctttgagtatcttaaatatgttctcatatttttttctaatattaaacattgctattaaaaacactgataaaatctaattttctttccttgtaagtcacttgttcttttcctagatcccaaaggtttgcttgtagtctaaatattttccagaatatgtctgttgttcattgttctgggtcagtattctcaagtgtacactgtgttcttttagtgtgtagtttcgtgtctcttcattttagcaattatagtatttagtaattgaatattatgagtgttaattattattctcacttggttttctgtgatgccacataagattcccttatgtggcatcttgcttatctgtcttcaacatttgttaggttcttttgaattgtttaaatctcttcatttctttttggtattttttattaatctactcttgtgtttctattacaggttgagtgtcccttatgtgaaatacttgggaccaaagtgtttcagacttcagactttttccgattttggaatattgctgattgagcatcccaaatccaaaatccaaagtaatccagtgagcatttcctttaagcgtcatgtttgcctcaaaaagctgcagattttagaccatttctgacttcaggttttcagatttgggatggtcaacatgtagtttagtcttcatttccaaaatgatgttttcttttatttctaattctttattgagttttgtcacctcatttataagctttgctggtttttcatgtatgtacctctttcatgtttgtataacttttaaatctttttagcttatttgaaattctggtgtattgttggcatgctttcactctctatatgacattgtatttctaatttgtaacagctctttttattctcttaatcttttattttgtagcaatctcttctcatttcttagctatactatcttatttttctaacgatagtaaggacaagctgttcttaaagttttcttctacctgcctaatttatttcttctaatttccctgcctgctcctctgcccccacttgaggcctttattattttagagacttttctcaaatttatggtagtccttggctattggctcatgtttaagagttgaacgattaaaaaaactaattagaaagtctatgtgccatgggtagggcttgttcacttccacactttaccataaagtaatctgattgagctgtttctttgtggaatcctctgcgttagaatcttttcattaattttttttctttgaggctgatcggattcttcagagaagattctttcagccccctaccctgaggggaataagcttactcatagtgctttggcagccaaatgaggagaggaacattgttcctctgtaaatttttgtttaggaaggctgtctcagttgatggtttcccgtagtccagactttcatttttactccctccagagaacaacctctggtagcatacctgagaggagaagggacatctgctgagctatatggaaggaatgaggagatctggaaggttctaagtatctcgtctcttttttcaacagttcctcttgtttttaggttgattcaacttcctgatacacctgttgttttcagttgccatattttttgtgggttctgcagtagaaattaaacgtttgcattgaactttcctgggcctatgaagtcagttatcatttgtctgtctactttctaaaatgccttgctattgtctcttctctcattctctttgtcttaagggtgtgtgtgtgagagtgtgtgtgtgtgtgtgtgtgtgtgtgtgtgtgtgtgtgtgagaagccctgttcagtgttgtttcaggagagagaggagaggctaatggcatgcattcatttcaccccagtacttggacctgtattgtacagtgaatgtcagggaagttactcttcaggtctcctgattcttttggagcaaatgataaaacgtttttctgttgacacattttgggcgacatagcaagaccatgtctctattttttttttttttttaaaaaaagaaatggctgagcacggtggctcatgcctgtaatcccagcactttgggaggccgagttgggcctatcacaaggtcaggagattgagaccatcatggccaacatggtgaaaccccatctctactaaaaatacaaaaattagccgggcatggtggtgggcgcctgtaatcccagctacttaggaggctgaggcaggagattcgcttgaacccgggaggtggaggttgcagtgagccgagatggcgccatagcactccagcctggtgacacagtgagactctgtctcaaaaaaagtaaaaataaaaacagagaaatggtcataaaggaatcctatgaacaattatatgccagtaaattaaaccatttggatcaaatggacaaattactagaaaggaatgctgtagaacatgaagaaatgttcacctggtagttgacattgtgatccatttgcaggctgttaccttctcctctcaaggatgcagtggaagtctcaacctggagaagatgctatacaatgcaagaggtgaactctgcccttagtaaaatccagctggtgggatattctcagaaaattgtgagtattcatattacatttcagttattcatgaatgctttccattcatattgttgtttgttgtttggaagaatcctatagttacgtttttaaagccattccattgctgaggatccagagcctctgttctttcctccgttccgcgcaggattttattggtgctctttccccaccctcacatctccatcaccagccagcattcgattggccagcgtgcagggagtccggagaaaggcgtctcatcctgttcacattagattttatagattttggatgggtgaaacgggaagagagaagagtttgtcaagtgtgacttttgagctctgacctaaatgataagccttcccatttcttactgtcatcctgtgcccagagctactcagtaccgaacaacaagggcctaacacctaactgaaaatgaaaaaggaaagccaaagtgtgtgagtctttggtctgtttggtaatatttcatctctcccttttaatgtgtgaaccttgagtgcctggggacatggaagagagctgaagctctcaggtgacaagtaaatattataggattgctttctttgtctgccagttgatctgcatcatctttctgttttccttaaaactttctagtttactttattgattgattgactgagacaaggtcccactttgttacccaggctggagcgcagtggtacaaacatggctcactgcagcctcaacttcccgggctccagtgatcctcctgccccaagtagctgcttgaggactacaggcatgtgccaccatgcccagctaatttttgtatttttttgtagagacagggtttcaccatgttgcccaggctggtcttgaactcctggcctcagcctcccaaagtgctgggattacaggcgtgagccattgcacccagtctctggtttactttaaaataatttttgtttttaaactgaggatatttctgttgtttttccctgcagaattacctcatgtgactgtcactgtaagctcattgcacattcttactgtggttctcttttaggagctttttggtgcggtccaggtgactcctctgagctctggctatgcccttgggagctccaactggatcatccagtctcattacgagaaagtgtcttatgtctctggatcctccttgcttaccacacacccccaggtaattccaaattctcttctagcaactcagctttttggttacttaagtcaaattcagaatgtatccaaggaaccatcagccatttttaaatcttccaaatatggttttctacagatactctctagccaaggtagactatttgagtctcaacattttgacctacaggtttctctgaaatagtcctgctaccttgagggtcactcctaggattctgaaatcccccaggccttccaaagaccatagcctgatgtgggacacagatggttatgcatttactcagcaaatattaactgtttaaaatccttcccaagggccaagtgtcaagtgtcatgcacacatctgggtattggggattcagtggtgaccaacgggcaaagcatgtgcccgtagatcttatgttgtaggggagttgatgatgttggggagaggatggtgtatagtaggtaaacaaataaagtgcctggtcatttccgattgagatacaagtactgaaaacagtaaagcagggtgattttcagaatgatggccattggtttagattgggtgcccaggaaagccaatgggaagatctcacttgaactgagacctggagagataaaccatgtcggctgggcgcggtggctcatacctgtaatcccatcattttgggaggccgaaatgggataactgcttgagcctaggagttcaggaccggcctgggcaatatggcaaaactctgtctctacaaaaaatacaaaaattacccgggtgtggtggcacacgctgtggtcccagctactcaggaagctaaggcagaaggatcgcttgagcctgggaagcggaggttgcagtcagccgagattgcgccaccgcactccagtgcgggtaacagagtgagattatgcctcaagaaaaaaaaaaaaaggccgggtatggtggctcatgcctgtaatcccagcactttgggaagccaaggcgagtggatcactttaggtcaggagttcaagaccaacctggccaacatggtgaaaccccatctctactaaaaatacaaaaattaggtgtgatggtgtgcacctataatcccagctacttgggaggctgaggcgggagaatcacttgaactcgggagacagaggttgcagtgagctgagatcatgctgctgtacccagcctgggtgacagagtgagactccatctcaacaaaaaaaaaaaaaaagagagagaaagaaaaaagaaaaacagagaaattagccacgtaaagccgtgagtgtttgtattacaaagggatggccagtgaagggcccctaaagtaagaataagctgggcatgtttgaagggcagagaaggctattgtggtcacagcgtggaggtcagcagtgaggtccaagagagtggcagacaccatgtcatgtagtgttagcaggctgtgaggaggaattttggttttattttaatatggagagggaaactattggaacgttttaagttattcattccagtcatatttggcaagaagcctagcacatataaacattgttatgaatgtgatacttactcctttttggtatttgtaaataatttactgttcatttcctgaatgttggttatttctatgtttgtaatagggagtggggggacattagttagctgttgaatgggtatatagatacattaggtaacttgtggaagtccatattacatttgtttatctacatctatttacggagagagagagagagagagaaggtcttgttctgtcacccggactggagtacagtggtgtagtcatagctcactgtaatctcaaactcctgggctcaagcaatcctcccaagtagctaggactatagccaccacacctggcctatttattttttaacataacctcaaatttttattgtcttcataataaaaccaaaaatgaagctaagaactggatcacttggccttttctccttttatcccttcccagttaaaaatacttgtatctcttagtagccagcattctcctagatctgcagttgggcccaacacttaagctttagcacaatctcgtttgtagttttagcctttttccagaagattggcttggtctgcctacatagccaccccttcctgccattaagccactttcccttggcatacagatcatcttttcccttcttgtaccatgtcactctgtggggttggtgccaaccatgcttcttacacaaagtccagtgggtttgaagaacattcaccatgttagagcactatcagtaaagaaagaaagaaattattcattttttaattacaaataaaaattgtatatatttatggtatgcatgatgtcttgatatgtgcatgcattatggaatggctaagtcaataattaacagaccccattttaatacagggagaaccatgctgtgctctagtgttgaacaataggatgtctgagctgccattctgtattatttctttataccttcttttatagccaagtttcatctcaagatctagaggggacgttgctattttttcctgcatctggcggaattctgggcccttcctggttattgaaatcaaaagcccatcaatgtcaccatcatctgcttcattgaatcaaaattttttattggcagcttctatcgttcctgatatgttcttccataaaagacagaaagatgacttggttgccaactctcgcgatttgtcctgcttagttcaaagcctttacagtactattgatgtaatttccagtaaattattcttacaaggtccataaatttaaagggaaaataatgtcttgaaagtaatgagcaacatacctaagtaattaattttaatttttagctggcaacctgtgttatatgtaaaaaagaaaaaaattagatttttctctacccacgtaattggattgtgtattgaattggcagggatgagaaaagttttggtttgaaaaacttgatagactaatgcagatgttagcaaactgtggcctgggcactaaatgtagcatgccacctattttggcatataatattttgttgaagtacagccacacccacttgtttatggaatgtttatggctgaatatacaccgtaggctggacaaggtggctcatgcctgtaatcacagcattttgggaggccaaggcaagatgattgcttgagcccaggaattggagaccagcctgggcaacatggcaagatcccatctctacgaaaagttaaaataaaataaaaaaaagccaggtgcggtggcatgcgcctgtggtcccagctactcgggaggctgaggcatgaggatttcttcagcctgggaggttgaggctgcagtgagccatgtttgtgccattgtactctagcctgggcaacagagcaagaccctgtctcaaaaaaaaaaaaaaagttataatggcagaattctactttaaatgttagagcaaactttgctaacccctggtctacttgagtacaatctttactaactaggaagaatatcacaggctgctgtagaattctgataaacatggggaaataaggctttggattaagcctgaggcagtaagaatggagaaaagagttaaaacattggcgggtctttaatgcaagaaacatttgttgaatgcccactgtcttcagaaaagaaagaataaaagttacagatcttatgtctgcatgacattgagaatggtgttaatggccattccagttaacaaggaagagttggcagagggacatttgttgcagaagagggtagtaggtttcatgaatgtgaatttgagagaacattagacagatgtaaatatggggctggaactgggatgtggaggcaagtctggagacaaactggagagttgtcacgttttaaaaatctaaccgggcacggtggcacacacctgtaatcctagcactttgggagaccaaggcaggcagatcacaaggtcaggagttcaagaccccaacatggtgaaaccccatctctactaaaaatacaaaaattaaccggtgtgatggtgctcacctgtaatcccaaatactcgggaggctgaggcaggagaatcgcttgaacccaggaggtggaggttgcagtgagccgagatcgcactattacacttcagccagggcaacagagagagactccgtctcaaaaaaaaaaaaaaaatctaaataaagggctgagggccaaagactgatccatagggaacttttaccaacagacagtggaagaaagaaaaatagtcttgtgtaagaatggatggagagttaaaggaaaattgaggccaaagagtgcaacctcccaaagggagaaggaagagaactagcctttactgagcatgaggtctcagtattaattttttaattgacttgatatttagcaaccatgctgaattctcttaattctaataatctattgatattatcttgccaaagaagtaacagttttctcacctctcttctaacctttgtatcttttatttttcttatcttgtgactgagccctataatactacgttgcacagcaatgatgatagtggacatccttgtcttgtataaggctgtaaaaggaaagcttttgtagtttcttcgttaaacatcacgcttactgcaccatgtttatttgtcaagttaaggagtgtctcctttatccccaactttctgattttttaaaagtcagatataagtgttataccttatcaaatgcttttgagcatgtgagatcaactttgatttctctcctttgagaccattaatgtagtgaactgcagtgttagcttttctcacatttaaccatccaatattcctgggataaatcttgcttgattacaatctattctttttaaaatactctccaggaatgagttggtgaatattttattgaagtttataatctatagtcataggtgaaaaatgggcccatacattattttcttgtactacctttgtttgttggaagccaaggtgtattagtctcataaggtgatttgggagcctttccctctttttctaatgtcagaaaaaagtatatgagatagggattatcttttcctgaaagtttggtcaaatgttccataaaactgtctggacctggattaccattattgaactatattttctgggccaaaattgtgccagaattttggcagagatttgtcctttttgcttaggttttcaaaatcataggcatagagctatttataatcctcttttatttgtttaaccttttttgtgtaagtctgttttcattctaaattttattttcatcatcatcttgatcagacttgctagaagtttgtctgtattattgattttattcaaaaaataagtttttgcttttaatcgttttggttgtattttcatcctttgttctgccctttatctccttccttccttctttactttggatttactctgtttaatacttgctaagtgtgtttcagtgtttgcttttcgataaatgtatttaaagcaaccggtttcttagtataattttactctgttacatttttgatactcagtgctttgtcattcatctctaagtatgtcataattttctctataatgttcatgatttaaataacyaaaggttattttacagtataattgtttgtttctagtccatccagtctgattagacgtaggattagaggaaatgtttttaagcatatgtttcaggattctaatcttttgcattataataaacatatcctgatggactgaaatttgattagtcttcctttgaagcacaatctatttttgtaaatgttctacgtgtcttggaaaagaatgtgtattcactgttgggtaaaatatttctatatgtatttgagttttttgcattattcaagtcttatatctttgcttagctactgatttctgaaaagggtgtgttagttgttgatttatctgtttctcactgtagtttgccaatttttacttttttaatatttctaagctgtatactcaggagtccatatattcatgatcattgtgttttatcaatcagttattctttttatcaggatgcttcgatgctttctttttttctctataaaaactgcattaaaagctaagaggctttttcccatttcatatgtgcctggttttttttgttttgttttgtttttttgagacaaggtcttgctctgtcgctcaggctagagcacaatggtgcaatctcaactcactgcagcctctgcctccgcagttcaagcagtcctcccacctcagcctcccaagtagctgggactacaggcacatgtcaccgtgccttggctaatttttgttttttttgtagagacaggatcttcctatattgcccaggctggtctcaaactcctggcctcaagcgatcggtccacctttggcctcccaaagtgctgggattacaggcatgagccaccgtgcttggccgggattttttttttaatctagtgtctcttggttggtgagcctgtttgtgtttcttgtgatgactattgtagttttaccatcttctttcatgtttttagttcattcttttcctagtcctttcttgccttcctttagaagtgtaaatttccttctgtatatgtgaaaatgcacattttatttttattcttctgagttatttcttagtttattttttctgtgactatcttacttatcagtatctgtatctttcctcccaaagccacactgtcctcatctcccctatctcccctcatctcttcctttgcacatcataccctatgatgaccatggtgaaaccatctagaattttagttctgggtcgtttagaacatacataatacggtggtgaatatattccttactgcaacaacagtgatcttcattgagatatattgtaagtttttcaaccttactttccataaacaggatctcataacatcctgctagattgacttttcttcttccaggaatgcttgaggaatgggaatctagagggtcttgaagtggtaagcctgtgaggccttgaattattaagaatgtctttaatttttttctcacatttaaatgatagcttggatggattaaaaatcaaaggcaaaaaacttcgataggataaagctttggaaatatgacttcattttccacttgtatcgcttgttgtcattaagaaccctgaagccatttagatttgcgttccattatatgggatctgcttttagaattttcactttaatatttgtaagttttaaaattatttctcttcaatgtgtgtttttcctgtgaatgtagtatctgtgagatcttccaatttcctttaacttaaataaattcttagtcatattttaaattacttactcctggttgattttcttttccttttaaggaatttctagtattatagatactgacacttctgtgtattgcatgtcttttttcttgtgtatttcccacctacttcatgaagcctcctggaaaaaatcttccagcccctgaattcattctcagccgtattcatgctgctcctcagcctatctattgaactcttcatttccacaactatacttttgttcacagtatttctaggtgtttctctttatacctgctcattttaattgccctctgtgtatttttgggacattttaatacatatattcctactctctggttcactaattctccctgtggggatagattttagctcaccatgtttagtagatgctgccttccttggtgttcttgtttgattccctgtgagctcttcttgcttgaccctcagggaccctcctctcataccactgcttcaggcattgtttctcctgagtgtctccctgacttgtcaccactttgcccttgtggtgtgagggaacaagcaaggagtggcttggtgttctgtgaaccttcatcccactgttctggcatttccttcctcatgcaggggggcggggggtattgaaccttccacaatctgccaactgtaatacggaggaaagaaaaaaggacaaagggtttttacccagcctctcctccacccgcagtagaggcgattgcctgccattttgtcctcattgcaagacccctagtttccccaggaatttatcccagttttgatttagtttctcaaatttgtcagctgcccttgcttctgagcgtctctgtcctctaagtttagattctgggagtgtggcagagcatattggctcatgcctgtaatcccaacaccttgggaggccaaggtgggaggattgcttgagctcaggagtgttcaagaccagcttggacaatatagtgggaccccgtctctacaaaaaatcaagaaagaagctgggcgtggtggcacatacctgtggtcccagctactcaggatgctgaggtgggaggatcgcttgagttagggaggttgaggctgcagtgagctgtgactgcaccagtgtgctccagcctgggcaacaaagtgagaccctgtctcaaaataaataaataaaaataaaaatagattctgggagcatgccagcagttcatgcccatgtgtggtcttgtcaggagttataatagacatcttattttgaaataatattattttcttctatttctgattagaaaattttaatttgtatttattgtaataattttggaaaatacaaaaatctcagagaaaagataaaaactatatgaatcctgacattaagagctatttgcagcctgcttttctactctttctgatgaactgtatagtgaactttacttaggtcatcatggattctaccacatgacatatgatatctgtttggtggtctgtcgcgtggatataccatgaaatgtttaactcttccactgttggacatttaaatggcttaaaacttttttccttaaaaaaacttatttcaaacagttgtacagtctgcccagaaaaagggcccaggacacagtttaaaaatggtaatactaatagaacaaaacaagcagcacctgttggaaagatcccataaacgtattggcaataactagcaagcacttttgattattgaagccgcagcctttctggccctggctaatcaaatgaatggatttgcttgtgacctgcgaacctgtatttgaatactacattttgtattatgttggtttgaaaagtcaacttaatagtcatattatttcaatagcttcttggctactctgtctgacttcaggggtagacttgagtttgagatgtgaaattccccagcatagtatagcaaaagctacatatacctagacgttagggcttggttttattatttacttactttatttatttatttttgagacagtctcactctgttgcccaggttggagtgcagtggcatgatcatgactcactgcaacctcaaactctatgggctcagatgatcctcccacctcagcctcccaaatagctgggactacagtgcaccagcacatctggctaatttttttttttttttttttgtagaaacggggttttaccatgttgcccagggtggtcttgaactcctgggctcaagtgattcacccatctcagcctcccaaagtggtgggattacaggcatgagctaggcctggttagttttagaaacttatctataatagaatgtgacactgatgtccttaccaggctaagatttgaagtatggaaaattgtagggcgtggtagaatattttgttgttactcttggcagtatgttttcatttgtgtttaggtttagtttgtttattgttttgatcttttctcatctttctgaccacaaaagaaacctggaaagtatccatcctacgcctttagctcttacctgaaggccttgaagactctccagcaccaacaccttggtctctgttctggaatgaatttggaaaaccaagcacagccagtcaaatgggctgtttccttcccatataacttttggccttgaagctaagacacgtggttctctggtttctaaggttccttgggtctatgagggagaaggagaggagagattatttgaaagcaaggattccacagggggatgtctgccttcgagcagtggttcttaacattttgtgggtcattaaccaaaagcctgatagtaagaatctgagagaactactccaaaaaaagtaataaaacatttatgcacattgacacagacttcgctttttatttctggggaccctgagtttatggagtcctcagaagcccattgttatttatcaggttaagaatctctggcttagaattttggaaataatttgtttaagaaatgaaataaaagaaaatgaattggcattttccacccagtcattccctgagcttatgatgttttattcttcactgtgggaattccttcttatccatgggattggaaggcggtgattggcctatgagaatgtctcctagagctggcacaattcccgcacctgtacttcatgatccttttccctttgaaggtcaggggaatgctcctattggctcattttcttgaggtcttaaagactctggcactggttgggcctggtggctcccgcctgtaatcccagcactttgggaggtcgaggcaggaggattgcttgagcccaggagtttgagaccaggctgggcaacatggtaaaactccatctctacaaaaaatacaaaaattagctggccatggtggcacacacctgtggtcccagctacttgggaagctgaggtgggagtcttactttagcccaaggaggttgaggctgcagtgagctgagatcacgccattgcactccagtctgagcaacagggcaagattctgtctcaaaaataaataaataagtaaataaagactggcagtaatgtagtttcttaaatctaaagaaaatatcttaaatttggatttcttgtatcaaggtttttgttttttgggttttttttgttttttttttgtttgtttgttttgagacagagtcttactctgtcactcaggctggagggcaagggcatgatctcagttcactgcagcttctgcctcctgggcttaagagttcctcccatctcagcctcctgagtagctagaggtataggcgcacaccaccatgccaggctaatctttttgtattttttgtagagatggggttttgccatgttgctgaggctggtttcaaactcctgggctcaagcgatccacctgccttggcctcccaaagttctgggattataggcgtgagccaccgtgcccagccgaatcaaatttttaagaactaaggcagttgctatgtaggtttgttttgtttttttgtaatgatttcttccccctgaatttccccaaatgttttgctgtttctgcaatactatgctctgatctggaagctctacagtaaaagttaaacctaatatatttgggggctagggtggcaggtaggctgagctactaatagtccatggatcagttggaggttggttccatgaagcaaggagggggagactggacaatttactggccctccacctgtttctttccacgcttgctatcttgtttgtcttatctggctgtacagcttctctctgcagaatatttccttctctcagaagtaacgtataccatttatgtgcatttgtttagttgttcattcattacctcacatagttagtgatatttcctaaacccctactttggggaacagagttaactaggctataggagaaacatgaaatttacagatgttataatagggggagaagatgtgtacatgcagaacttttctccagggtgcaggtgatccgtcaagtggatctgctgcttccatctcctcacctgccatgacattataatttgtttctcctgtctggactgctatatgggccttaaaaatgttctctgtctgtttgctctcacccacctcctttggtgaaatctcctgtaattgctgttaccagaatgtcatttgctgcttcagactgttggctcctcactgcctgctctgtcagtgggcatgatcctgacctttttggccctttaccaattgcactctctttactcaactcctttctccggcccaaagtacactctccatcctggccaagtacattcatttggcatatgcatgctgccttgccctgcccatgccctcccgcctcctgcagtctgcatgcttcccctcaccttcctgactcccactgcactctcccagtgtgaaattctgatgtttcctaccagaccatgttctttttatatattcatctgttcagcaaatgtttgtttagtaaatgctgtatgccaggcattttgctaggcaacagggaaacaaagttcttgccttcacggagcttcagagtcctgtgggggacacagacaagtaaatagtactttcagtttggagtgatcagtgctgagatagaaagtattagatgccccagggcacatattaaagggacaacttggtataggggaagggagagatgtccgggagatgttccaaaggcagtgagtgacccaggctgttgaaattgagtattaagttccttagccaaggagtgaaagaaaactggagcaaaacatcatctgccaaaaagccatgtattactgacctcagcacaccaatgtggctgagtgaggcccgagttgggtgttgctggctaggggtccccggcttgcaaagtgaccaagaagaagaatcacttgtttgtgactttcaactttgtaaggtattttaagttggtacttggacaagatggctttttctttgtgtgtgtatttgaacaaaatgttcccgtttgcagcactcattgagtggtcattgacaccagtaatctatacatttgccctttagtggtgaaatggagttgtttgaggtgtcagcttggtttggagtgtcactaaaagccttttaagcctgcttcatcacagtagccctgggaatcaacgagaaatgtctctgagttaagagctaaaattacaaacatccagtctgacctgatcatgaggtatcttacaatggttccaactcggtgacattcgacattcgtactgtagcactgcctctgtttgtttgttagtggtcatttaacattcaaaggaagaagatgctaatggccaaggttcagagataatgtttctagagtttgctctgtgttatatgttttgttttgtttgagacggagtttcgctcttgttgcccaggctggagtgcaatggtgtgatcttggctcactgcaacctccgcctcccgggttcaaacaattctcctgcttcagcctcccgagtaggtgggattacaggtgcccgccaccacgcctagctaattatttgtatttttagtagagactgggtttcgctatgttggccaggctggtctcgaacgcctgacctcgtgatccacccgccttggcctcacaaagtgctgggattacaggtgtgagccactgagcctgacctgtgttatatatttttatctggatcagtaggtcttttgttttatttgagagggagagagtcttgcactgccacccaggctaaagcgcagtggtgcaaacatagctcactgcagcctcaaatgtcagagttcaagtgtgaatcagtagttcttcatctttttggggtcatggccccatttcaccacccagttaaatttatggaaaagtatacacagaggctggtcgtggtggctcacgactgtaatcccagcactttgggagatcaaggcaggcagatcgcttgaggtcaggagtacaagaccagcctggccaacatggtgaaaagttttctctactaaaaatacaaaagttagccgggcttggtgatgagcacctgtaatcccagctactcaggaggctgaggcaggagaattccttgaacccaggaggtggaggttgcagtgagccgagatggcaccactgcactccagcctgggcaacagagctgtctcaaagaaaaaaaagaaaaaagaaaagtttacacaggcacacacagaattgtatataccattttagaaggttcctggatcctctaaagtccctcatctccctttagccctcgggatcattattggttcattctaacaaggtccatataaaatgattgccattttaagctaactgtgctatccattgatgccttggttcctttctcaccattctggtttccttgcagttgataactcgcacacgagaaacagtctgaggccccttacacatctgctgctaagaatcactgtcctgtacttcccttcctctcttctctggaaataatggatgcatatgtatttgttggagaagtacaaatagatgagttctgcccaagcagagaaaaagctcttacatatttgtgtgaatatacttgtgcaaatagaaaatagaagctattcacatatagctgtcttcaccactggcctttttctgtttccatattaaatgtttttcaggttataaagccgcttataacgtaagatcaaaattgtgttatttaaaaaataatgaagctcatgtatccatgcttatatataatagaaggtgaaaggaaaatactgaaggcacagctactcggagaccacaatgcagatgttgagactttgctattatttggaattttatttactgcgaaattgggtgggagagaaaaaagaggagtaagccttcttagtaaactgtgttgctggcttttttcttctgacgatccactgggtattttcaatggagatgaggaaaggatgtgtttcagatggaaacctttatgaactctcctgtgagctctccagcttctcaatccatgggccctcattttggtttcttattttaatcctaatttatttagaaagggtaatattttttgaaatgctttgaaaacaatcaaaattacattcaagctgtggtgagtaaaaataaaaacacagcatcctaagaatcacatagtagtgtgccctgggagttcctagttcacaagaagatcatggatgttaacctgagagacttactgaagtcatctaggggagatgggtcaagaaatagccccattttataggaaatccagctcagagctgtgactgaggtcatgaggctggtcatggaattgggagtagatttgaccttctagttcccaatccagggttcttcatggcttctatgccactgggacttagtgtaaatctccttacctctttgagtcctaaattccatattccgatagtgtatgcttatttcctgtgcttcagagttattctgagaatcaaattctataacgtatgcttctcaaagtgtgattccccaggccggcaatggcagcatctcctgggaagatgtgaaaatgcagattctcaggccccaccccaacctgaatctgaaactctgggaggggcccaacaatccgtgttttagcacaccgtccaggggattctgactcatgaagcttgagagccactgatgacacgtgagatagcattttgaaaagaagaaagcattacagaaatacaagataccttgttttaatggaggtaaaatgtatatatggtgaaacacaaagatcttaaatgtgtaatactgaattttgatataatcagtgccccagtgaagatacagaacttgttcatcccttataaagctccctcttgcctcctcccatcagtccccacccaacttaggcagccagtggttaaggacagactattccttagagaacataagagaactcgatgatgggttaaacgtagaaagagcaatgtctgtgttctcgtattctttcactatttgtaggtaatgttccttttaaaattactaaccatatttctgtgttctttttcagcccatggaccaagcttctctcaaaaacagcgatgttcttgttctgacagggcttacccagatccccactgcaaacccagatggaatggtgggagagttctgcagcaacctaggtgtgcaaccgtctctcatcttacgttggatgatctatcttgcatttattttacaataataaatataatattttacaataatgggggaaggagtgcttacagggtagcagttgtcaaaggagggaggcagtatatctttgcaaataatagcacagaaaagagtgttacactttgaactcacagcagcgatacagtgaacagatagatatgtatgaatgtttgtgtgtttgtttttgagacagagtcttctctgtcacccaggcttgagtgcagtggcataatcttgggttactgcaacctctgtctcctgggttcaagcagttctcctgactcaatctcctgagtagctgggactacaggcgtgtgccaacacacccggctaatttctgtattttttgtagagacatggtttcaccatgttggccaggctggtctggaactcctgacctcaggcaatccgcccgctttggcctcccaaaatgctgggatttccggcatgagccacagtgcccggccaaacaggtatattttttccccactaatatttggttggttttattttttcttcttttgaggaaaggctaaattaagagaggtatggggcattttctacctggaagaaatttattttccttcggatataactgtcactaaatctggaagttctgcttctcatttagacaaataggttggttactgtcttagttagtttgggctgccgtaacaaaatactgcagacattaacttctcacaattctggagactgggaagtctgagattagcgtgccagcatggtcgtttcttgatgcagatgattgccatcttgcagtgtcctcatgtggagaagaggggaagctctggtgtctcttcctcttctttttttttttttttttttttttttgagacggagtcttgctctgttgcccaggctagagtgcagtggcacgatcttggctcactgcaacctccgcctcccaggttcaagcgattctcctgcttcagcctcccgagtagctgggactacaggtgtgcgccactgtgcccggctaatttttgtatttttagtagagacaaggtttcactatgttggcccatctggtctcgaactcctgacctcatgatccgtccgcctcggcctcccaaagtgctgggattacaggtgtgagccaccatgcctggcctctcttcctcttcttatgagggcatgaatcccatcatggggcctgcaccctcgacctcatctaaacctaatcacttcccaaagtccctgcctctctgtaccatcacagtgggggttaggccaacatgagaatcttgtgggggacacacacattcagtccgtaacagctaccaaagaggtattaatgagctcagaccttcagctccagcaactttaagtgatattacttctgctctaggaagaagaagtggtcatcttatatttacacggaaggcactgttcttagaaattaaacttagccatgctaataaacatagtctgtttttgttctttgatactaatgcaaaggtaatttatttgtaccttagaaaaataattggactaatctcaaatagagtcttggtttgtatgtttgtttataatctagaatcacagactcaaagaactttaggcttgaaaggaaccttacatttaattcagtctcccaaagtggggtccactaaccgcattcccttaagaccaatgggattacttattaaaaatgcaaatttgggggccctaccttagacctagtaagtcagaatctctggggaaaggagacttccagaagaaaagttgcattttcaacatattctctggcattttccacgcaaactaaagcttgaaaattactgatctaattcattcttttcatgtaactgatgcagaaactgaggccaaggaaggttgtagtggctttcctgtggtcctgtgggttgggacaaaggtaggatttgagacaggctcttgagctatgaccagcgatgttgattttctccactgtatcctactctagtaccatactctagtaatagcaagtccaccagccctcaagttatagcatctaggtgagcctaagtacttaaagtataggggattttcctgcagacaaatgttaatgaaagaaaatactactaactcctgcagacaaacgttagtcaaacagaaaaactcggcctattttcttataggtcattcagccatggtcagagactgaacagagacaaatccagcaaatttttgagcaggatctaaaacgggaaggagcttggaggctctgtcctgaagctcagctgccattggtaaaaacccaaacccgtagtcacatgctctattcccagggacctagattagacaatgatgagaaaatcattatcagcctatagcatcccctgctttgatgtgttcttcaaaagaagcagcttattagacatgtaagtaaatcataaaaacagaagtaggaaaacaagtgcaaatcttattttacaagtttatctttataacactgcccttttgatatgatgttttttctcctctggcatccacttttctagctctgacagtccggaatggaggaaacgtgttggttccctgctacccttctggagtgatctatgacctcctggagtgcctatatcagtacatcgactcagccgggctttccagcgtccccctctacttcatctcccctgtggccaacagttcactggagttttcccagatctttgctgagtggtatgtccgtggtttttttttttgtgtgtgaattttatttgattcaggacattcaagcagtaagaataaaaataatcctgttttttctcacattactgtggaaatttcattttgttgtttttctgtctgtgataagattgcattattaaaagccaaatctgttgcattgctaagtttagaataatagttgtcaaagagggaagaatgcaaggcagagacttaccttagcccagcactttcaaaactggtaacaaaaatcttatatacttatcacatgtcaccctctgcctgttactaggtgaaatgacattctaaaagttaaaaaaattttcaagcccaatctcatgttgtctaaaatgtatagtgccaaatctgagaagaaaaactagatttttaaaaattgcaatagtatgatatttgacaaaattttattacatcagaaaattgatcaaatcctagagttggcaaaatatgaaacaatatgaaattagtgaacctttttagagttatttaggtgcatgtttgaatgtaactcacctgaccaaaaataaagggagaagaggaaaataacttttacaatatccccagtggtgccttagaatggtgcttcccaaacgttccgggactgtgacacaggcagtctaggctgcatttaatcccttttagtcatgaggtagccgatagacacagcatgtactgagtttctaattaaaaaggaatttgtacatcatcttctcatgatatattcagttacgctgcccccaacccttgcttttgtaaagtacttttttcattcccttctgtggtcgtttttttcccccctgtgtttagactcatacaggcgtctctatcccatgtacaaattattcttctttgtcactttttttttttttttgagacggagtcttgctctgttgcccaggctggagtacagtggcacaatctccgctcactgcaacctccgcctcctgggttcaagcaaatctcctgcctcagcctccgaagaagctgggattacaggcacccgccaccatgcccggctaatttttgtattcttagtagagacagggtttcaccatgctggtcagctggtctcgaactcctgacctcaggtgatccacccgcctcggcctcccaaagtgctgggattacaggcatgagccactgcgcccacccttaaataacattagtacattattattaactctgaatctttattctgattgcaccagtttttccacaaattttttttttttgtttttgtttgggatccaatccagggtaacacattgcatttaggcctttgatttttttgtttttttgcaagaagttttttttagttttttatactgatagttttagtctcttttgcagtttcttctgttgatactatgtttagaaaattcttgcctctataggtgtcacatggctaaacatactttctttcagttttattgtagcttctttctttctttttttacatcaccccttaactattttatctggaatttgttttagtatatagtatgaagagaagcactaatttcattttttcccaagtagtcaagtacttacctgtccaagtactatttattgagtaatgttaactttttcagctgatttgtattaatgccatatgccagactttcatatgcaccaggttttgtttctagactatcctgattgagtgatccattcattctttggccaacatgatgctaatatattttaataactgcagcctcacttataattgtactctgtggtaaagtacatttctccattatttttcttagaattcttggagctatttttgcttacttatttttgtggaagaattgtggaatcactgtatcagttttcagaatatctttttgagtccacaaaacctataaattacagtttgcagtagttttcccatgctgagacatgggatgtgtgtctgtcttttaagcttttcaaatattcctcccgtagactcttaaactcagtgatcatattattcttgtttccatcgatagttctatttgcttaaatccataaacctttaagtgccaaagcactgaggatacaaagaggtccctgaccttgaggaatctgtaccatgaaggaagaggcagctgtgtaaacctcttaccactcggaagtaatctgatggaaatatatacacacatacccacacacacacctacgtatatctgtatggtattcagagaaggggtgggtggtgaccccatttggggggttaagaaaggcattctggaaggaggtgctcctgaagaataaccaagaatcagccagacagaaacactatttaaggatgagttgggtggtctgccggcggtgatgtgtgggtggagaggataacacaagccaagacatagatgggaggttagaatggtttggtttgttcagagaactatccatagttctttattgttacagtatgaagttcagggtggggagtggcagggtatgaggctagagggatcctgtccatgggggggattcattggaggattctaagcaggaaatgaacatgattatatgtgcattttatatagagccttctgcatttatgtgaagtttgttgggaggtggtgggagggggtgcaactgaagtacaagacaagagtctttgcagaagtcgagggactgaagactccagtctctaccatcctggaggaaagcaaggcaggaacccatatgagaggtgattaggaaatacaaggggcaggacttactggttacttgatacagaaaaggtagcaatcaagattgacaccacaatttctagtgtagtagatcgtgttgaccccaaacaaaataggttctacaaaggaagggtaggttcatacagcaagtgtggttagcttagtttggttttgtccctgagggcattgacggtgcctgaggcaggggatgtgcaggtgaaacttgtccaatccaaagatctgagaagcccaggctggagtcataggttggggtgtcctcagcgttgaggtagttgagtggctgggattgccacaagaatgaatgggattgtctggggagaggatttgaggttagaagaacaggcagtggggaaaggatggacttaagtaatgcctgcatttttggggtcattagagaacaaatatttaggaaaagtgtgaagacaaatagttaaagaagtagaagaggccgatcagggtggctcacacctgtaatcccagcactttaggaggccaaggcgggaggattgcttgaggccaggagttcgagatcagcctgagcaacatagcaagacctcatttccacaaaagattaaaatattagcagggtatggtggtgcatgtccatagttccagctactcgggaggctgaggcaagaggatttcttgagcctgggggatttctctgtgtttctgtttcactgtgctgttctctttcatgcagccttgctgtaaggcaccctttttccctaaataaggaactcagttaccaaaatggagagctgctagctccagacttgcattaacttagcaagtcccagccccccatgccaggaccaccacaagcctgtgctgagggtttggcttcctctcctctttggtgttctgaacgggtgcttcacagcctggctgctctgtgctcagcctcaggcccggcctgctgttccctatcactctggttccctggctctgtgcttcccgttctcaggggttctgctctggcttctacatggtcctgctttgatgcctgcagaagcccagccccttgctgtccagtgtctgcccttgctccgagctaaggggcttggttgtttgggttggttttgtttttgcaggggatggagatgggagggaatagctcttgaaagacctctctgatcttttggagtttggagtgttggggttcggagtgttggttggttggtttttgagacaggctctcactctgtcgcccaggctggagtgcagtagcacaatcacggctcactgcagcctcaacctcctggtctcaagcgatcctcccacctcagcctcctgagcacctgggactacaggtgtcaccatcatgcccagctaatttttgtacagacaaggttgcatctcgtctgaacccatgaactcctgggttcaagtgatctgcccgccttggccttccagagtggtgggattacagtcctgagccacagtgcctggctctgatccttttttgaacaagcagtggaagagtgtgcggtacctgaggtctggccatcagggagcaggagggtctgtcacattcccaattagagataatcctagaagcgccatttattcttcattcttcctgataatctggtatacacagatctccttttgaactctaacagctacccccagaagaagcaaactctaatcaggtccttcagcctctgtcttagaaagggggtgggtccctgtctgctgtgcctgcatgaggattctagagcagagtatggaggatctgttagcagaactggcctaagcattatgtaggtgggcttcacaatctctaatcatattgtaatctcttctgtatccctaatctctgcctttaatgcatgtaggataatgtcctttggaacaatcaaaataagtttagaaccaagctcttatatttgtctccctgagctagaaataaagacagaactagtgtctatttagataatataaggtaaccctccaaaagcatcttgctcttccatatttatatcttccaagtagggtataaagtgatgtttttttaaaccaaacttaaacgaaactaagggtaggaaaaattagatacaatgtattaatacaaaatccaagccctgaagtcctgagctcctcccctcaaagtagtgactatttttttaaatgtcaaacctgcacaacacccacatatattgatttatcaactgtgaactttttgccacatttgctttatccagacatctcagtattgtaaagtcataactgactaggaaaaagcaaatgtaaattaccaaaaacattcacattgtctctagcctgtgatcctttgttcttctctagttggagttaccaatgctgctgttaaaaagagtgtgagggccaggcacagtggctcacgcctgtagtctcagcactttgggaggccgaggcgggtggatcacctgaggtcagcagtttgagaccagcctggccaacatggtgaaaccccgtctctactaaaaatacaaaaattcgccgagtgtggtggcaggtgcctgtaatcccagctacttgggaggctttggcaggagaaccactggaacccaggaggtggaggttgcagtgagccgagatcgcgccattgcactccagctgggcaacaagagcgaaactctgtctccaaaaaaaaagtgcatggacaaaaacagaagccatgtctcaaggtgtagatcactttctttgtgaaattgaccacaactaaatgcaatatgataccacggattggatcctggaacagaaaagggacatgactggaaaaactagtgaaatctgaatgaagtctggagtttagttgattgtcattggcctgatgttaatttcttagttgacgactgtgccagtcatatcagatgttaactctggggacatagggtgaagaggccatggaaactctgtactgtctttgcagcttttctttaaatctaaaattattccaaaataacaagtttatattttaagaaaaaatgtattgagaaattctaaagtttaaaaacatacaagatacatctcttctctgtaggcactggatttcattcacagtgaaattcactggcgggaaatttttaaataaacttcagtatttaatatttgcactgctgccactaggtggcaacagatgccaccgtatgctcttcctcacatgctgatgtgtttttcctctttaataggctttgtcacaacaaacagagtaaggtgtatcttccagaaccaccttttcctcatgcagaggtaagaaaacaaaatcactgggacatgggaaggaagcaatgtggataacctgatgcagatgcagacagcaggtcattagatgaaatagattgctgtgtaaacctgtagacccctttgcctcccaagtcagacacagggaagtattttaactcaagcttcacttgctttcctcctattaacactttctattgcgcacgtggagcagcccttctccaaaatgttgtggaccgcagaattgtttcagacttgggattcgggaatatacttactggttgagcatcccaaatttgaaagtctgaaatcaaaatgctccaatgagcatttcctttgagcatcatgttggtgcccaaaaagttcagatactggaacattttggattagggatgctcagcctgtaccatgttcatgcaattcatagcctgcttctgttctactgactgcatgatgaattgtatttcgatacatattactacctttttaaattgggtttatgtattgtcagagtgttctttccagttatgtcagtcatatatgtacatttttagtgacgaaaataacatttcagttcaacaaataaaaggcttcttcctccctcacagaacaaatgggtgttttctatatagctgaatacctagctttgttgtcaggttcttttcacccaagggtatattatgaacgtttttctgcgtctcatgttattattgctctactacaatgaagctaacagacaatagttactcctcatttttggttatattttcactcaaagattctctaaattggtatcaccaccttagaaaactgacagtattggctgggctcggtggctcacgcctgtaatcccagcactttgggaggccaaggcgggtggatcacaaggtcaggagatcgagaccatcctggctaacacagtgaaaccccgtctctactacaaatacaaaaaattagccaggcgtggtggcgggtgcctgtagtcacaactgctcgggaggctgaagcaggagaatggcgtgaacctgggaggcggagcttgcagtgagcccagatcgcgccactgcactccagcctgggtcacagagtgagactccgtctcaaaaaaagaaaaaaagaaaactgacagtatctgctaaagctgaacaatgtactctatgcctccgcagttttgttcctaaagtatacattgaacagaaatgcatagagatgttaccaaaagacacacacacaaatctagaatttggtcaggtgcggtggctcacacctataatcccaacactttgggaggctgaagtgggaggatcactggaggccaggaatttgagaccaaccttgacatcatggcaaaaccctgtctctacaaaaaaatacaaaaaattagcccggtgtggtggcacatgcctgtagttctagctaccctagaggctggggtgggaggatcacctgaagctgagggagttcgaggctgctgcagtgaactgcaatcgtgctacttactgcacaccagtctgggtgacagagcaagaccctgtctcaaaaaaaaaaaaaaatctaaaatttttggtaatagtactgaaatatactcaaattcccatcaacaatagcatggattttgtggtatactcacacggtcccttacatcactgtgaacaaataagctccaattatatgcagtgtagataaactgcacaaacataatgtgagtgaaagatccagatataaaagagtagatatggtatgattttatttacataaaagttcaaaaacacaataaactgatctgtggtattagatgccagtgtggtagtgatcctggaggggaggggacagtagtgacaggaaggggacaaagagggatttctgaggagctagtaatgctttatttcttgatgtacatgtgttcaccttgtaaaaaatccatcaaggtgtagagagttagatataaggaaagagtgaaggctggaatgaatcctgtgctgttggatagaattgatggtattggtgtgaactcctattttcaatatatgtagatacagaaagaaatccacttgtgcatgtgtgtgtatgtgtgtgtctgtgcacatacgtatcttccagctctggccacacagagggcctgggagcagtgacatgccactaactgaggaacacatttagctcccacatgttggtttctagataccattctccactaaaaggaaccaggcctctttggaaaatacaagatgaggctgtaagatcttgctgtatgctcagagaaagatggggacatgtcagaagccacatctgagatcactggaacatcaaaataaataatgctagtaatgaatataatccactgaataacagaaactcctgcatccatagtgaggtaactgagtacataggcaagaggggaaagttcttccaacagtaaactcataattaacataggaaagaaccttagaattagaaaatcaccatttggcagccaccgcagtaataatttattcctgcaagaaacaccagtgggtgctaaaaccagtgggtgaaaatgttatgaagaactagatcatttatagtcccaaaaagtatgtccccacaaaagtcatgtttattacaaagacagaaatagtaactggagtttggacaaacttgacatatgcaatcaacgttaacatcaccagtaattggactaactgacattgcgtggctcttaacacaaattattgagaaagcagcatgatttctgtgatcctgctgctaaaaatgcttcacctgaatctagtgagcattcagacccaagtcgaggatgctcaacaaaataactgacctgtaccctttgagaatgtcagagacctagaggacaagggaagactgaggaactgccgagagaatgaagagatgtgacagatagatgtactccatggccatgggctggatctggaaatggaagaagaaagatctagtttgtttgctattaggagcattgataacagttggtaaagtctgaatcgggtgtgtagatgagagggggcagtgttgtgtcactgttcattccctgcttttgatggttgtactgttataatacatccatgttaactgcgattatctccccacactcatttctttgattgtcatatttataacccctcctcaactaaggcaggtagactgtttttacttacagcatgtcagtgcagatagatatgtttagggatttagttgttttgttttatagttaactaacacgtatttcaacaaatgtcctgctaattactttaaatgtaattgctgttttcatactgtaaaggataggtcttttatgaaccaggatgccaagtagaaggttttgaagaagttattttttggtccctgtagtctaaatagtattttggcagccagggtttttgcaagctgtgtcaatgccatagtgaaacacaggctagaaatattataaaaatgtcagaaaattaagtgtggcaaaacatcttgtggtggactttgctcttgaatgtctgttttgcttcctttgcagtcagccttgctgtagagcttgttttctaggagtgtgatcacattctcactcacacacctgtcacaaatgacctggtgccatttagagttaggaatgtgagtagactgtggtcgtaccatgagggttcctcaggtgcacttgtcgttgttagggcatgagggagtcaacccttggtaatgttaccaatgcccatgagaaacggtggttccacccttagtactggtaacaaattactgttcagaattcctgccccacagcttcatttccactggtcaaatgcagtaagttggctagaaaggtagatccaattggcaaaaaacgatgaatttatcttagtttctgtgcattgatcagtagagctacaggaactatagataatgcttaaaagtgacttacgtgtgcagagacctgctgctattcttagaatcacattcatcatcttgacatcttaggatacaatagaccctttttgacagccactcacccatttaactgagacaactaatgattttggccatatagtttataaaaagaatgtcagttcaacttgcagactacctggaaggaacgtgggaattcgatgtttgctccggctttactattcatattccatccaagcatgcgacagctgatgaagatctccaggatagtgttagtgtcttcctaatacaaccaggtctcttcaattaaagatgaggtcttcaaggtgaagagagtttggcttctgtttggggtatgtcctattctggccacatccccactcttagggtgacttcatttgcacttcaaggtgttgcccagggccctctcatgcacaacatgtggcaacaggattgagcctatcacaggccattgctttatccatgaaacagccttccagagcagtgcttcctttggcctggttgatatttagggtctgtgaagtctgggtgtctagcctctggatgctggggtggggcaaggaggcctgggcagcaggcacagtgtctgagacgttacaagatgccatctagtcataactgtctttgctattgccttgaatgggcctgacactgggagatgattgtcaagtgttgtgctgcaggggagactcttggttcaacacgtacacttgaaagaaagctttgaggctgcggggcacctgcttctttttttttttttttgagacggagtctcactgtcgcccaggctggagtgcagtggcgccatctcggctcactgcaagctccgcctcctgggttcatgccattctcctgcctcagcctcccgagtaacggactacaggtgtccgccaccaggcccagctaattttttgtatttttagtagagacggggtttcaccatgttagccaggatggtctccatctcctgaccttgtgatctgcccacctgagcatcccaaagtgctgggggtttttttgtgtgtgtatgtgttttttttagtgacagggtctcagttacccatgccagaatacagcgttgcaatcatagattactgcaaccttgaactcctgggctctagccacagtatccaacaactttttttattttttgtagagacagggtcttgctttgttgcccagcctggtctcaaacttctgggctcaagcaatcctcttgtctttgtctcccaaagtgctggaattacaggcgtaagccattgtgcctagcccatttcttaatataactgtctgtgttaccaggacatcacatttctaaaagccaatttgatctttgtcgtgcatgtgtgtgtgcgtgtatgtgtgcatgtgtgcacacatgtccacatgctgtacacattcagagaagcttctctagtagcaaacaacagaaatgatccctgaaagtacagtctttggtcttggtccttattcagttgctgcagtagcttaacacagctctagctttgcaggaggaggtcctgtactggcaaacagtgtttctggtgtgacagatgtggttactgtcaccaggacttggtgattcacgagtgttgggaaagtcacttgtacttcaaacaagaagtgataatgagaacttcaggcctggtgtggagtgtcaggcagcttataaaggaagagtccagctaaagcaggccataacaatctgaatatgtttccaggaagtatgtcagtattaccagaaagacttgacttgcccatgtgttccacaaatcacattctgggtaaaaactattttaataagattcacttgtatttttttaaattaataagtgttacttttcacagcagttttaggttcacggcaatcatatgcccctgccccacacacgcagttgcccactgcaccatcccacaccagagaggtgcgtttgctacggctgatgaacccacattgacacgtcactctcgcccaaagcccagagtttacagtaggggttcccttggcgttgtgctttctatggttttgaacaaatgaacagtgacctggatccaccattacatcatcacacagaggagcttcctcactctgcagatcctctgtgctcagcctgttcatttcactctccacgaatccctggtgaccgctgagccttttactatctgtatagttttgccttttccagaacgtcatacagttggaatcataggggccttggcttttcagagtggcgcccttcacttaggaataggttccttcatgtcttttcgtagcttggcagctcatttcttttttagggctgaataatattccattgtctggatgcatcagtttcatccttcacctgctgaaggacacatcttggttgtttccacgttttagcaattaggacattcatgtgcaggtttcttgtggacatgatttttcaaaatatctttcaaagtggctgtatccttttgcattcccaccagcagtgaatgagagtccttgttcttccatatccttgttagcatttggtgctgtgagtgttctggattttggccattttattataacaggtgtatagtggtatctcatcattttaatttgcagtttcctaatgacatacggtgtggagcattttttcgtatgctcatttgccatctctcttctctgatgaggtgtctgttcaggttttttgcccactttttaatagggctgttcatttctttttgctgaggtttcggagttcatagattctgggtcacagtcctctctcaggtgtgacttttgcaggtattttctcccaatccgtggcttgtcttctttgttggtattttagatccagtcccgctcaccctcccgtactttggttcccccttcagcctgggcaggctcacatttctttgtattttttctatattttccagctcattcagaccaataagctgaagcactaccccagcatccacggagacttcagcaacgactttagacagccctgtgtggtgttcaccgggcacccttccctccgcttcggggacgtggtccacttcatggagctctggggaaaatctagtctcaataccgtcatattcacgggtaagtgaaaaaaataaagaaacaaattggttctctccactgaggccatgagtgaatgcacctacaaggtagagacccagggaaggattttgcagtgagacataaatacaaacattattctactgtaggtaccaaagaatgaagaaaccgcagagaaagagtgaagcagtgtgtgccattggacagctgggcatccagcgaggccttcatgcctgtgttttcagatttctccaagacagaatcctgctgagtgcttttgctaggatatcgtaagccatttcaagaagtgcagtgattcagtaacggtcttgttttacctgttaggaattgtttacagaggtagatctttttcttctgattgtggtttactctaactgtggattttcttctggagacaaatccctcaggggaaaaaattcctttgataaggtcaagtagagtgtttacatagataatgactgtatcattttatcagtgtagcgtgcccagccctttgaatgctaggtcttttttgcttatctgtgataggggatatcttggaaattatgcacagacctttttttttttttttttttttttttttttagctcatcagtcatcattagtgttagtgtattttatgtggggcacgagatagttcttcttccagtgtggcccaaagaagccaaaagcttggacacccatgtgttagggtcttcagtcggccttgggttttagaaatcttacaggctatgaagaaaaaagaaaaaaaaaaaaaaaacattgatttgaaatctggcccagcttgcagcaacctcagccaattcaccagcaagcatgactgtccccacagtaaatgggactgtcagtagctacctctgtgggtcactctgggcaccaggcacagaacccggcacatggcggctgttgggaaagcactgtcaccagctcccttcctagctttaggagctgggaatccagttacaccagaagcactggggtgacgcttcagcccttcccccagctttcatttgtgacctagaggccaccaggaacacgcctgtggtcaaaccaagttgggtttattgcctcatttcagcaaggggaacacacaccatgggtaaaagaaaagcaaaaagaccttgcaggactccggctggtgttcggtgatgcgcaggtgttcgcggaggtgaggcgtcaccctgtattgggtggcgtcaggatgcagggtcattctgcgatgggtttcttaactcattcttatctagaacacaggaagaatggagccggcatagcgggaagtttgcttatgctgtggtcaggacagttctgtgttccgtgttcaggatgattacagaggggtcttgtctttggccggatccatcattgtcagacaaggtgttggtgttccaggaagttgcgttcacacagcaggaggacacatggctttgctgtgggtgccaggccggctcttgctgataccaggccaggcagaaagtgccaggagaggccccggtcaccaggactgctttcctcttctcaggcctgctttgggctaaaggtggaggaagttgggccacaagatattgattgacaacacccagaacttcatagctgccaagatttcattaattaggaggttgtccagagaatgtcctatgtagtggggctgaggttggtgtctcctgctcctgctgctgagtggtgactcgacatttgacatgacagtggtgacagcatctacacagcacagtagataacctggcctttagtacaaatgtttcttcagctaaaaggaaatcaggactgtgtgatttcctgtgacaactctgggtaatgggtttgcatttaaactggtttatggggcttccagggcagaagttgtgtctgggagaggttggggccatctttttttattgttttgtgactcctggatacatgaaaagggggtcagtattctcagagaagcacaatccactggaatgggcatttatgtacctggcagctctgccagtttgtcctgacaacagtggagacgtctctgtgtctggtgtgcctaagccagggtccctcgtcgctgggcacagactgtgctgggaatcaaagtgtcacatcagttaggaccgagcgaggtcttttggctcaaggcaggcagctccctcgagttgggggaatgttccctgccaagcaggctgcagcagccctcaggagacaggctgagcagagggcgaggactcttcccggtctgaggggctggggctgctggggagcatcccagtctcagtctacagaccattcacgggcctggaggcggggccgtgcgcttgtcttccgggtgcatctcacacctgggcgttaactcagagctgattctaggttcccgggtctgtaccaggcctctccactgtgaagtcagtttttcccattgtattaaatcagtaccttgtgggggactctttgaaactatatacatattctgttctccctcaaaatggtatctgatatttttagcatttgttgatgattttcatctgaataagtgatgaactgtaatggttgccaaacggtggttttggtttttatttcatcgtttgtttcttggcatttcgttgtaaaaagagctttcttttctcccccacatatgtatttctccctcatttacctcatctgcctctgctgaagcttggagcccacccacagggtccatcccagcctgcccctccttccacggggcccctttgacctccgtcccccacgtgtgcttcctggctccctcctgaccccctgactgtctgtgggccctcagcgccccagttgctgtctggcttggcagctcctgtgtagtctgcattgtaagatttctttcttgtactttccctagaaccagacttctcctacctggaagccctggctccttaccagccgctggccatgaaatgcatctactgccccatcgacacccggctgaacttcatccaggtgtcaaagctgcttaaagaagtgcaggtaatgaaggacactgcttgtgccttcacgtagtcatgtcaccttggtgtggctcatgcttgtgtggggtgaggggagagagatctagctgtgtttgattcttgtcttcagttctcacgcatctgcagaatgctgggacacatgccagcccccctccacactgaaaaggagtggtctttacaccctgaccgcagtttccattctaaagaaatcagatgtggaagggaaagaaaaccatctgtgtccgcttaaaagcaaaccctctcacccctgccaaaaaaaaaaaaagtcattctagaaacatactcactaagctgagacagtttaaatgaaacgcgttactggggccgtgtcgcacgtgtaggctggtaccacaaacagtgctgtcgggtttgggttttgtggcagtttttggtcatttgtttcacttcacattttctgccctggagaaagggaagaagtagctggggtgcagtgtagaccaggaggcgcgcgtagcaggaaggcagggccacggaaccactgtgctggctcagccactgctcgctgggtttctggctcttgagagtcgggagaggaactggaattggcaaggaggacagctgacaccggcgaggaagagctctccctttccactccctggtgttcccaggagtgagatgagggtggaggggcccagcacagcaccttcaacctcaggatgagagaggccctttcacaaaactctaaggcaggggaacaggaaacagagaaagccggagaaccccaggagggccccaagagcggattctggtgattattaatgtgcttgcccaatgaagaaagaatactggcactctctaggtatgatgagagcagacagcaaacgtggggcctgtctacagtgattcgctaccccaatgtatgctcatccacgttagaagcagcagtgaaaggcgtgttgcttttcattattaacttcaaatcccagtccctaaaccagctcttgacgcccctctgtcaggtgctaatcctggaaactggaggccacctggtctccactttaggtgaggaaaacctgggagaagccatcagactgcacctgtggcatgagatgctttgagacaggtcaagaggaggagcaaagggcagtttggaggagaaaagtattagccctaaggaacaagtgcttttggaagctcagcccggtcagcctggtggaaagccgtcttcagcagggaattcagggcttggtccaagctcttaagtagaagcagggacaacacagtgcccctgtgggctgccagcattccttttcatttgggtgatatttgtgcaaagtaaaaattggtttactaatctttttttctcaagataacaaaaagagacattttgtttaaaaaaaaaaaaacaaaaaaaactctgcctctgctccttggttgcacatggtgagcacatgagctgaggagtgcccactgcctaataccagctgacctgcagatccagcggaaactccaaacccacagcgccagcccggcacgaaaagccacagctcttggtaatcagccaagagcttataatagcaggcatgtgggaatgttagagaaagaccgtgccccgaggaagcccagagaccgctgggagcagacacatggaagttaccgtgaaacttatgtaaacagtaagaaagataaattaagctgaggcagtttaggggtttccgagatgtttcttctgccccagtgccttcacgttccctctcctgtctacggttcattgggcttgagaggatgaaagttcaccttggcctggaagtggtgagcctgtaatggcggggagtggatcggggtcaggaatgggccttccacaggggccactgtacttcacaccacctttctcaactgtcccattggttcctcagcccctgcacgtggtgtgtcctgagcagtacactcagccgcccccagcccagtcccacaggatggacctcatgatcgactgccagccccccgccatgtcctatcggcgggctgaggttctcgccctgcccttcaaacgtcggtacgagaagatcgagatcatgccagaggtgagctgttctccttcctagggttaaactagagctttccacagaggctcttggagatcgtgcaggggtggccttcttttggatttatgtcaagtataaatgaaccaggctgcgcgcagtagctcacgcctataatcccagcactttgggcggccaaggtgggcggatcacttgagggcaggagttcgagaccagcctggccaacccagcccagccaatatggcaaaaccccatctctactaaaaatacaaaaaaagtagccaggtgtggtggcacgcatctgtaatcccagctactcgtgaggctgaagcctgagaatcgcttgaaccaggaggtggaggttgcagtgagccgagatcacaccactgcactccagcctgggcaacagagtgagactccaagtatgaatgaacaaagaacatggacccttaaccaagtaaccgggaagaggggggattttcagggccttcttgtttttcaactaataaaataacagctgttagtcaggactgctccttacctagcattcagcagcgtgagccctgggccacatcatgggtcagagccctgggaagtggagatgctgacacccgctctgtccctaaataccataggatggtgacttttctcttccttcctggacctcagttatgagtgagtgtcaagagtttgctgaattcagaggtagatgggggagataacaggaaccaaaaaataaggattgtaaacttggttatttatatcctcttgagcatacttgcaggttttggtctatcaaagtctaagtattttataggtctgtgaactcttagcttcagttttagcagggaaagagccaaagcatgctgtccatgttgaacagctgtggcatgctgcgcttgggccactcctctgagagggagacagagagggacgcggcctctcctgaaagacagcgttgaggatggttggaggctacctctggcttcctttcacctcttgaggcaacttgaatgtgttttcaacagacaggaaaaagaaatataaaaacttattgttaaaaccagtgtgcccaaacttcttttggagtttgaggttcagaaatggcctccagaccttgggttggaggtcttggctcctgaatgtgactcatttccatgagcctggagaggctgctagggaccaccaggtgccatctttatggttgtttaatgtttaatatgtttttatcattttgttatgattttttcactttctctggattgtttttgtctggtattttacaggggctgggattgacggccttggtttagatttcaactctctaagccagcattccttaaaccttttggtctcagacatccttacaaatagaactccaaagaggttttgtttatgtgggttatgtctattgatgtttgctatatgagaaattaaaactaagacattttaaaaatattcacttaataatacaaacctattatatgttaacataactaagggataaagacaaaagcaaaaatcagtcccagtgccagggataaatgttaagattttgatgtatttgccttgtctgttcactgtgtgtgtgcctactggaatcacacctcatacactgtcgtctttttcacctatcagtaagtacattatatcatttaagatatttcagccaggcatggtagctcactcctgtaatcctagcactctgggaggccgaggcgggtggacaatgaggtcaggagttcaagactagcctggccaagatggtgaaaccccatctccactaaaaaaaattagctgggcgtggtgtcacacacctgtaatcccagctacttggaggctgtggcagagaattgcttgaaccgggaggcagaggttgcagtaagccaagatcatgccaccgcactcctacgtggatgacagagcgagactctgtctcaaaaaatatatatttcagctgggcatggtggctcatgcctgtaaaccccagcacttcaggaggctgaggcgggggtgaatcacttaaggtcacgagttcaagaccagcctggccaacatgatgaaaccttgtctctaataaaaaaaacaaaaattagccacaggcgtggtggcaggcgcctgtaatcgcagctactcgggaggctgaggttgcagtgagccaaaatcgcgccactgcactccagcttgggcaacatagcgagactccgtctcaagaaaaaaaaaaaagatatttcaaaagcttcagctttaatggttgcataatggtctgtcataatttaacagttccttttttcatagatttttttttttttttttgagacggagtctcgctctgtcacccaagctggagtgcattggcgcgatcttggctcactgcaagctccgcctcccagcttcatgccattctcctgcctcagcctccctagtagctgggaccacaggcacccgccaccatgcccagctaatttttttgtatttttagtagagacggggtttcatcgtgttagccaggatggtctcaatctcctgaccttgtgatccacccgccttggcctcccagagtgctgggattacaggcgtgagccactgcgcctggccccttttttcacagattttcatttctggtttttctgtgttataaataacacttttaggagcatccttttacataaatctttgtccatatatgtttatttccataagaaaattttctgaagttagaatttctgggtcaaagattatgaacatccctttctggctcgaggctatatattgccagcttgtcctctagaatgagtgtgacagtttatactcccacagcagagctggagacagctcttacttctgcctccttgctaatattgaatgttgtccttttttagttattttccaattttattcaagtcttttccagttatataagtatacactgttatctaattttaaattgtatgtctttttttttctttttttgagacggagtctcgctgtgttgcccaggctgaagtgcagtggtgagatctctgctcactgcaagctccacctcctgagttcacgccattctcctgcctcagcctcccgagtatctgggactacaggcacctgccaccacacctggataatttattgtatttttagtagagacagggtttcactgtgttagccaggatggtcttgatctcctgaccttgtgatctacccacctcggcctcccaagtcctgggattacaggcgtgaaccaccgtgcccggccctatgtctttttttgagacggagtcttgccgtgttgcccaggctggagtgtagtggcacagtcttggctcactgcaacctctgcctcccgggtgcatgcagttctcctccctaggctctcgagtagctgggattataggcacatgccaccaatcctagctaatttttgtatttttggtagagatggggtttcaccatattggccaggctggtctcaaactccagtctgcccaccgtggcctcccaaagtgctggaattacaggcgtgagccaccgcacccagccaaactgtacgtctttgatcattaatggaggtaactgtctcaatccaacttgctacagtaattgcctttaaaatggacattatggccaggcacattggctcaggcctgtaatcccagcccttgggaggccaaggcaggaggatcacttgatgccaggagttcaagaccagcctgggcaacacagcaagacccccgtatctacaaaaaaataataaattagccaggcgtggtggttcatgcctgtagtcccagctactggggaggctgaggagggaacatcacttgagcccaggaggttgaggttgcaatgagctatgatcacaccaccacactccagcctgggcagcagagtgaggccccatctcaaaaaaaaaaagactccttcagagtcgtcttggaaatagtgcatggctgcccagggagagcgcagaacgccatccccaaagctcccaccccagccttgtgcagggaggaggggcctgtgtggaggaggcctcaggtgaagaacgggatctggcgcacaccctgctcctcggcaagggccgcttcacgctcgccataggccgttttcttatttcatgaaacaggcctcacgtaccacttgccaatctgcttaagtatcctaagctgcttcctctgcccgtttggtattgatcttcatgtttacataatggcctcttgcatgtttttgtttttaaataaaggtggcttggctaggtaggggtctacatgtcttaaaaaccatgcagctaaacccagcaacagagcacctaataaggtcaggctgcacggcagggcacccatcaggtgcaggtggtcggaaagataccaccccccaggtaaagccgtggctcccaccatcaggagaagtcagactttcaggaagagagagctccctcaaccgccatgctgctgtccccgtccttcctgccactggtcacctggagaggggatgagggtgaagtaaaggccagaatgaatgaaaggctgcacttggtgtgtcacctgggcgacagagcaagactccatctcaaaaaaaaaaaaattgtttacctttaaagttatttcatctttttagactgcagtgatgtaaatacagattaaaggaagagtaatggtcatcattaaaggcccccagcctgaactgcgccctttgctttcagctcgcagattcactggtgcccatggagatcaagcctggcatctccttggcaactgtctcggccgtgctgcacaccaaagataacaagcacttgcttcaggtagggggtgctgggtgggagtgcaggggaccctctccccagcaagaaaccagaccacctaacagattatatttgaaatagcgcttcatgtgaattcttgttgaagaattatttccctggccatgtgcctcagagaggctgctgtgcccagagatgaggccgcacgtcatcccaagggctgccacaggcacattctgttggggagcgctgccacacgaggcagggctgtggggagacgtgcagggtggcaggtgcagccctgcccttgggggctggaaccggagggcacctgcgtgaggctgtggctacctgagagcctggtcctaccaatgacccacacacaggtgggtggcacttcagctccagggcaggcactgtgtcttaagaattcctttcagatctggactgtgtcacctttatgccacatgtagagttgctcctagctaccacttaaagtctattagaccctgtgctgggtccttgacccgccttgtcttactgagccgtcagaattcactgctgtcatcatttcgtaggcagcttctctaaccttggccagatggtggcaaaggtggggtttccccctttggtctgaccccacagccagtgtgcccagccacggggtcatgatgtacctgcagcacgacacagtgtattctggagaatttactcagcagatactgaagtgaaccacctgaaaatttaaaaatggatcttgatagaaggcagagatcttagcgaataaggtgttggtaggctggacagttgagcattagagcgcgtggatctggggctcccggcagccagggaacctgaaccgagtgccggctgaggaaaccgggccggggctctgtggcctgtgaggacaggatagtctcaggctctcagtgtggcctgcggtggcccctgctgctcagaggaagctcatgaaagccactctttccttctgctctagccccctcctcggcccgcccagcccacgagcgggaagaagagaaagcgggtgagcgatgacgtaccagactgcaaagtcctgaagcctttgttgagcggttccatccctgtggagcagttcgtgcagaccctggagaaggtgagctggtttcgctggtgccgtgaaaactccacacgtggcagcctttccctggctcactatggccccctggctgcagggagtggatgttgctgcttgtcacttagtccccactgtcctgtggcatctgtttggtctaaggtcctgctgggagacccaggagaaagaaagcagagtgaggagtgccccatccttcctcccagcacgaggtcaccagaaggcctctccagactgaagaaaaagctgcttccacacacacatgtgacgagtggggcagggtagtgaggccaggacaaagagggacccggccctgccagagtcttgcacttccacagatgactccttgctgtcagaggggagccaagtctccagtcgactgtcaggatttgcaggaggcagtcgggggaggggacactggcccttcccctctgtctcagcagccctgatggctgcttctcccagagatgagatttcttgactatgattaaaagaaaaaaatctaaccttaaaggttgtaattttggcttcagtcacaggacttcagagatgactttattaggattatagaatctttgataggaagaaggaattggctaaaggtaatactgttcatgctgctgcttgcaagaactgcaacaaattacaatcattacaaggaaggagatttctatgaactttctatccaatgtaaatatcacagttgccgactttcaaatcttaaaggctttccctttcctaggattggttttctccacctgtctttgattttcccgtagggaaaaaggctctggctgggtggttgcggctctcttccaccctccctgaagaccttgcagggctcctgggccctgttaatgggcctcaagctggacttttaaaaacttaagatgaggaccttctgcctggcccagcctatgtcctgacccagtgttccatcccggctcctctctgcagaaggagcaagcacctgtccaagtccctaggggagcctgcagccatgaagtacaggtggcctccccacaccgaggcccttcacctgctgtgtgtctgtttcaggcacatgcctcctttccatgtcacgtctgatttgtaaggaatttctgtccttagcattagcaatagctgagaagtttgcactgctgccttctctccttcactcttgagagggctctgccaagtcccacaggggtatcttggtgtcacctggcattttcctgggagctcagacagctgaaacttaggagggagctgtcaccagggaacggcatggtgcaagcagctgagcgtcccagactcctgaacacagtgcttggacgtgccctcaaagaactcacaaaagcttagccaggttgtggaaattctgttgttttgcatgagcttttgcatgtttagggtctcttttcaagtataagaaactatcactatcataggcctatgactagtctgaagaattgtgttgagacgtgtcagtttctagaaagttcagtcgagtctgtgaagtgtcatttacagatctcacagatgtgcagtctgcccagcccacctctttcttttcttctggagcagcatggcttcagtgatattaaggtggaggacacagccaagggccatatcgtcctgctccaggaggctgagacgctcatccagattgaagaagactcgacccatatcatctgcgacaatgacgagatgctcagagtgcgactgcgggaccttgtcctcaaattcttacagaagttctgagtgggccatctgagctacttccctgaaatcctgcagtccctcactggctgccctcacaagccacctgaggagtggcatgagaggccattaactgtgtctttgtggtgtcctctggcttaaggagtgaagaggtggctcttgagggaaatggtctggacttattcccagcactgtttcaggcaagaactttccctttcaacttcaggctcattttcttctcaactctggctctctcaaggagctggagggtggcagaagtgggacaggagaagttttccaagaggttcatgggaggcggaggtgactggctggctgtcttgcatcagtcccaggcctcggccaggggagccagcctttggtttcgtttacttgcctacagtgctgtacgcaataagatgatgatcccaaaatatggtaaagtgaacccatctgtctgcattttctactctgagcccatttgttaataaacacttatttttatataattagctgtcctctgttgaacctaccatctatatattgatttagtagctgaaaaaatatgaaaatatacagaacagcatgaacttagaaaacaccacaggaaattgaattttgatgtgtatgttaaatcatataatttgcactgtttataaaaacacagatctgtttctccttacattgcataagaaggtgctcacctttaagctgtggctgcacggagagtgatgcaggtcggtacaccagcctcaggctccacctgcaccgcctctcccacagatcctcagtctctgcattaaaccgggcgttactcacagataccctcagagccactggtcgtaggaagctttcagacaaaagtaacctcacaaaagatgactgcttttgaaatgtataaaaccaacagttaccaggtgaaatagcacgagctgtgacacccaggccaactttgcgagtattaagaacaagtcttagccctggcaggcgatgctagatagtatgcccagcgcaggctattcttaaccatcttgttggagtgattgattgattgaaattcactcagaagtcagtcctccaactcggctgacaactaaacagcacacagggatttagtgacccaataaatacataacatgaacagctgcagaactgactgctctggctttatggcgcattatcactcctcttggaacaatcgtattggtgggaatgagtgcttcgctaaagcagggaaaagactacttcatgtttgccatctccaaccttgccaaacctgggcatgggaatgcttaagtaggtttctaattttccaaggtttgggtccactccagtcaagggataggctacagaataaacgagaggcttccaaccatggggcaggactgacattacaagagatgaatgtgccatggctatgaacatttagttttctttttagaattgcaaatagacatcccaagcaggcatacttccaatagaacctttgaaagaatcaagtgaaattaaattttaaaaacatctgagggccaggcatggtggctcacacctgtaatcccaacactttgggaggtcaaggcaggcggatcacaaggtcaggagttcgagaccagcctggccaacatggtgaaaccccgtctctactaaagatacaaaaaaaattagccgggcatgatggcacacacttgtaatcccagctactggtgaggctgaggcaggagaatcacttgaacccggcaggtggaggttgcagtgagccgagatcatgccattgcactccagcctgggcaacagagcaagactccatatcaaaaaaaaaaaaaaaaatctgaaatgcaaaaacagtgtaagctagagctcaggagaaaccaaaaatggttattttatttaaatgtcctagcaatgctatctaggaatgatgggatctgtcaagcctgtctgccgtgaaagggcttgatcagagagcccagtgctggtcccttgaggggggttgcaaaagaagtgagcagtaagaacaagcgagtcagtgggtgcccgatgaacagggtgcaacttagtaggttttaatcaagtcatcaccacccacttagtggcagaagtcagaggcaggaagcagcaaagactcatgctttataaaaagcagagagaaaatccagagccggcctttccaggtatgagaagagcagttatgagtaactgcctaaagttcaggtatttggataccatgccaggttggttagaagactccaaagaagtggcataagtggcagacgtggcctggctctatcagaaatgcggcccaccgacattaactgacattgactgacactgacatcaacctggcgaagactctgacatccagaaaagtttgtactcaaacccagtggaatcctaatgattaattgaaaaaaacttaatagtgcagagacctcatattatttaagtcttagtacaaagtgatatattaggtatctattgcacaacaaattaccccaaaacacggtggctcacgcctgtaatcccagcactttgggaggccgaggcgggcagatcacgaagtcaggagatcgagaccatcctggctaacacggtgaaaccccatctctactaaaaatacaaaaaattagccaggtgtggtgggcgcctgtagtcccagctactccggaagctgaggcaggagaatggcgtgaacccaggaggcggagcttgcagtgagccaagatcgtgccactgcactccagcctgggcgacagagcgagactccgtctcaaaaagaaaaaaaaaaaaaaaaagaaaacctgacttttctcatctcactgtttctgtggtcgggaatctggtgtagtgtggcttagctggtcgaccctggctcagggtctcctctccacacggctgcagtcagctgttgggtgagggaacagagcttaagtaactttccgcagaaccgccagtgagtggcctctgccttaccgcaacaccgtgggtgagtatcaggtcagcagccagccaggaaatggcaatctgtcttttaggccattgctttccaagtcacatctactccatctctcctgatccctgaagagcttgaagcttttggccctcacagttgtcctataaaggcatttccaaactgtaatgaagtatcaacagaaacaagagtgaagaaacctttaaacctgcataatgacatattaacaagagtcaagcaacgagtgggaagggaaggaggacacttttcctctggccctgagtccagtttttttcctgcagccaagaggagtagttaatgctgtctcactgctttatgccatctataagaaggtagacaacacttatctttcaaatgcactgcagtgggactacacataaataacagtagtcttctttgaacctaaaatagagtggaaataaccaatgacaattatggaggaagtcacaggtaaatcctggagaccagcagtgccaagctgagccacagggccattctcactgtagacttgagccagcctccatcaggaactgatcttctaaagatcaaataccagagtctccactgctccttggcagcccattatgggttttaatcacatcataaagcattatatacattatggccaggtacagtggctcacacctctaatcccagcactttgggaggccaaggtgggtgaatcacaaggtcagaagttcaagaccagcctggccaagatggtgaaaccccatctctattaaaaatacaaaaattagccaggcgtggtggcagatgcctgtaatcccagctactcaggaggctgaggcagagaaatgcttaaacccggggagggggcggggggatggaggttgcagtgagccaagatcgcaccactgcactcccgcctgggagacagagccagactctgtctcaaaaaaaaaaacaaaaaaaaaaaccatctatctatctatctatatatatacatgtgcacacacacacacacatgcacacgttaaatgtaaacttttgagacacaggaccacagatctttgaaaggggtgtaaacgcccatctccttaggcatgtagaatatttcttgcttctcttctgttggcattgcaggccattgaaaaaaatgtgcaaagcccccgtgtaatggtgtttgtgttagaaggatttaccctttacctttttctacaataaacattcctaacccatgtgtaagcctccctgatgtagttatcaaatcaatcaccagtaaaaagtaacttaattctcctacaataaattctgagttaccaaacacattatcaattaaaataagtttgctaacgtttccttaaattatccaatataagtttttactctagtaactatttacatttgcttcacatactttggaaataatggactttcatttcacaaagcctttcccaatcatcagtaagcaccttccagtcatcagtgggcattagtcggcagctgctcacatattcggtgtgttgtgccctctctcatggctttagctcaccgtcacagataagcatttctcccagacttacagctagagaggagcacatttccaggaccatgagcaccctgggggcagggtctgttttttccaccttgtcccagcatgaggcttgtggaagaaggtaaggaaagaaaatttcagaaatatttaggaattacaggccaaaacaacatttcctggtgggtcagttttttaactgcaatgttctaaacatgggaacctgcacataagtgtaaaaatccctatcatttagcccatgctttaaaatagctactcgattcagtgggcagcttcctgatgagatgaatcagaggttggtaactgtggccgaaaagccaaatctggcccacaagcagagttgttagaaaaaagatgcaacagaaatcacatgtggcccacaaagcctaaaacactggctgaccctttacagaaaaagtatgccaatccctgctcaagtgctgtgtgtgggaacatttctgtagtttattcaagtaaaggtcaaataatggaatggcaatgtaacagctcccatcagacctgaccctcctagaggtaaaactataaactccagacgtatgtagttacgtaagtaggtagatagaacaacctaccacaaaaaaacaattccattagagattttatcacccttgtaataattattaaaacaactagacaaaaaaaaagtcatagatgacctgaacaaaactgtcaaaaactttgacttaattgatactttttagaatacttgctctgcagcagcagaatgtttactatgaaaaccatatgctaggtgataaatctcattacatctgaaaggaccgaacgcatacacaaaaccttctcccaccacaatggaattaaattcaaactcaacgaagtattttggaaaaccacaaatatttagaaattaaacacttctaaaatagctcatggatcaaagaagacatcccaaaatgaattggaaagtattttgaacagaaaattaaagctcaacatgtacaggatactgctaaagtagtgcttaaaagtcatcttatacctttaaatgcttacagaaaaaatgaaagacctaaacttgatctaaatttttaccttagaagactataaaaagagccaaataaacccaaagaaagtagaggaaagaaatcataaaaataagcaaaacatgagcaaaacagaacagagaaaactaacaaagccaaaagctgattttttaaaacatcagcagaactgatacacacctcattagactgatcaaggaaagacaggaccgactgcccatatgggcagtgaaaaaactttggttatcactacagatcctacggatatgaagaagacagccaatcagaaaggaaagaggggtattactaaagagcctacaaatattaaagggataaaaagaacaccaacttatgccaacagatttaccaccacagataaaatggaaaatttcctttgaagacacaaatagacaaagctcattcaataagaaaaagaacttgatattcacttaagaaattaaatttattatcttctcacaaggaaaactccaggcctagatggtttccctgggaaactatcaaacatttaaggaagaaataacaccaatcttgtataacctctatcaaaaagaggaagggggaatattccagtcccttttaaggggccagcataactctaataccaaaaccttataaagtcattaccaaaaaagaaaatgagaggtaaatatctctcatgaacatcaatgcaaaaaaaaaaaaaaaaacttaccagcaacctgaatccagcaatacacaaataggataatatgacatgaccaagtagggtttatccctggaatgcaaggataattaaatatttgaaagccaatctaatttataatagaatagaggatcatttcaatagatacaggaaaaaaagcatttgatgaaattctctaacagcactcagcagacaggaataaaagggaacatactcaacctgataaaggttatgtatgaaaaacttaacagctcagtgaaatactagagcttttccccaaatattgagagcaaagcaaggtgccgatccatactactgttctatggtgttctcggagtcccagtcattgcaataaggcaaaattgaagaggaaaaggcaggcaggcatacaaacagataaagcataaaggtaggaaagaagtaaaactgttttcagatgagactttttacatagaaagttctaagaaatctagaaaactactggaataagctcacaagactgcaaaatacaaggttggtatccaaaagtcaactgtattttatatattaacaagtttttgagagagagtcttactttgtcacccaggctgaagtgcagtggcacagtcatggctcactgcagccttaaactctcagggtcaagtgatactcccacctcagtttcctgagtagctgggatcacaggcacatgccactgcatccagctaattttttttttctttttacttttatagagacccaccttggcttcccaaagtgctcggattacaggtgtgaggcacaacacctggccagaaataaaatgtttttaaaacagcaacttcattcataatagtgtgagataacttttgaaaagatatgtaagatctctacactaaaagtctcaaaaccttgctgataaaaattaacgatttgaataaatggagaaatatgccatattgatggattagaatactcaatactaacattttaattctgcctattgatttatggatttgatgcaataccatcccagcagacagccacaccacaacctaacccaatgttttaagtaggtaaaggacttgaataaacatttttccaaagatgatacacagatggccaatagcacataaagagatattcaacactggtcattagggaaatgaaaatcaaacccatgaccaggtaccacttcacacctactaggatggctgtaccatttttttaaatttttatcagaaagtaagtgttgggagaagtggagaaattggaaccttcatacgctgctagtggaatgtaaaatgacacagccgctacggaagacggtttggcagttcctcaaaaagttaaatacagaattaccatattgtccagcaactccactcctctatagatacccaaaagaattgagagcagggactcaaatatttggccacctatgttcttagcaatattattcaccaccttagtaaccaaaagatggatgcaacccaagtatccaccaacagataaacagataaaacaaaatgtggaacatacacacaatgaaatattatccactcatagaaaagaatgagattctgatacatgctgcaacgggtgaaccttgaaaacatgctaagtgaaataagccagacacaaaagaccacatattttatgatttcatttatattcaaatatccagaatagatgaatccatagagagagaatagaggttatcagaggctggaagtagtgggggaatgggaagttactgtttaatgagtacagaatttgttcgcaatgaaacagttttgtaactagctagtggtgagggttacacaacattgtgaatatacttaatggaactaaattgtacacttcaaaatggctaacatggcaaattttatgtttaaatttttttaatctgataatgccaggtttcttagaagagactgggcagtattgagatgaattttatgtaagcataagagctaatgtacaaaaatcacaagcattcttatacaccaataacagagagccaaatgatgagttgaatgctcattcacaattgcttcaaagagaataaaatacctaggaatccaacttacaagggacgtgaaggacctcttcaaggagaactacaaaccactgctcaatgaaataaaagaggatacaaacaaatggaagaacattccatgctcatgggtaggaagaatcaatatcatgaaaatggccatactgcccaaggtaatttatagattcaatgccatccccatcaagctaccaatgactttcttcacagaattggaaaaaactactttaaagttcatatggaaccaaaaaagagcccacattgccaagtcaatcctaagccaaaagaacaaagctggaggcatcacgctacctgacttcaaactatactacaaggctacagtaaccaaaacagcatggtactggtaccaaaacagagatatagaccaatggaacagaacagagccctcagaaataacaccgcatatctacaactatctgatctttgacaaacctgagaaaaacaagcaatggggaaaggattccctatttaataaatggtgctgggaaaactggctagccacatgtagaaagctgaaactggatcccttccttacaccttatacaaaaattaattcaagatggattaaagacttaaacgttagacctaaaaccataaaaaccctagaagaaaacctaggcattacccttcaggacataggcatgggcaaggacttcatgtctaaaacaccaaaagcaatggcaacaaaagccaaaattgacaaatgggatctaattaaactaaagagcttctgcacagcaaaagaaactaccatcagagtgaacaggcaacctacaaaatgggagaaaattttcgcaacctactcatctgacaaagggctaatatccagaatctacaatgaactcaaacaaatttacaagaaaaaaacaaccccatcaaaaagtgggccaaggacgtgaacagacacttctcaaaagaagacatttatgcagccaaaaaacacatgaaaaaatgctcaccatcactggccatcagagaaatgcaaatgaaaactacaatgagataccatctcacaccagttagaatggcaatcattaaaaagtcaggaaacaacaggtgctggagaggatgtgcagaaataggaacactttttacactgttggtgggactgtaaactagttcaaccattgtggaaatcagtgtggtgattcctcagggatctagaactagaaataccatttgacccagccatcccattactgggtatatacccaaaggactataaatcatgctgctataaggacacatgcacacgtatgtttattccggcactattcacaatagcaaagacttggaaccaacccaaatgtccaacaatgatagactggattaagaaaatgtggcacatatacaccatggaatactatgcagccataaaaaatgatgaattcatgtcctttgtagggacatggatgagattggaaatcatcattctcagtaaactatcgcaagaacaaaaaaccaaacaccgcatattctcactcataggtgggaattgaacaatgagaacatatggacacaggaaggggaacatcacactctgggactgttgtggggttgggggaggggggagggatatcattaggagatatacctaatgctaaatgacgagttaatgggtgcagcacaccagcatggcacatgtatacatatgtaactaacctgcacattgtgcacatgtaccctaaaacttaaagtaaaaaaaaggaatatattatgaaattataaaattgaaaagaaaaggagctaatgccatagaactaattctaaaatttacagagaaatacaaagtaactataatattgaaagcaatcttggagatgaacaaagttggaaagctgcattcatcaagaccgtatggaactggcacgaggatgaacaaagcagcataacaacaaagatggttcagaaacagagccccacttctataatgaccaccttttcaacaaagggaagggaaagtctttttaacaaatggtgctgcaatgcccatatagaagaagtatcagaaacctgaccactgccacacaccataaacactgagatggatctttaattataagagctaataccataaagcatttggtgaaaaacactgaaaatatcttcatgatgttgggtaggcacaggtttcttgggtcacagaaagtagtaacaagagaattgtatctcctcaaaattgaaaacttctgctaatcagacgacaccatacagaaaatgattaggcaagccacaaattaaaaaaataatttacaaaacatatctgacaatggactagtgtccagcgcaaaaaattcctgtaactcagcaataaaaaagactaaatacatccatacgatactattcattgagaaaagaaactggttatcaaaccgggaaaaagatacaaaagaaccttaagtgcatattatattacatgaaagcagccaatgtgaaaaggctacatgctgtatgattttatgtgacattctggaaaaggccatagtgtgaaaacagtaaaaagatcagtggttgccagagattcagagagggagggagggaccaataggtgcagcacaggaagtttttaggggagtgagactgttctgtgtgagactgtaatggtgaatatatatcattacatatttgtcaaaacccatagaacatacaacacaatgaatgaagcctaatgtaaacccatgggcttgagtgaataatgtgtcaacactggctcatcaattgtatcaaatctatcacactaatggcagatgttaataaaggacaagtgaggggtgaggtggaagaagaagtctctttgtacttctcatgcagttttgctgtaaatctgaaactgctccccccgaaatctattaaaaatgtaggaagaaaagaaagcaattcaaaaaaggacaatccagtttttcttaatgggcaaaagatgtgtacagataattcacaaaggaaatatatataaatggcgtaaacacatgaaaaggtgcttaaatcaccagtcatcaggaaaacgcagaatgaaataagacaccattactcaccagaatggctaaaattaaaaagactgaccagaccatggatcagtgaggatgtggaactgggagtctcataattactggtggaagtacacaatggaatgatcgcattgagaaaaggtctagaagtttcttacaaaactaaacatgtatacatctaccatattacccaacaattccactcctaggtatttacccaagagaaataaaaatccacagaaagacttgcacatgaatgttcacagaaactttattcataatatccaaaaactggaaaaagccccagtacctatataatagaacggacagattttactcaattcatacaagggaatactaagcaataaaaagtaactaatcaccaatctattcagcaacgatggatgcatctccaaaacgttatgctgggtgtgtagaagacggacacacacaagagtagaaattataggacaccatttatatgaaattctagaatatggaaaactaatccaaaatgaaaaaaaccatcagcattggctatgtctgaggatggaggacgtggggactgactaggaggaaggagcaggaggggactttctgggttgatagtagtgttccatatattgagaggggtctgggttacacaggtgtgtgcatttgtcagaactcaaaagaatgcacactgaagatgtgtgcattacagtgtgcacgtttaaaataaagtttacattaaaaacacaaacattgacctataatgaacagttgtatgcccatgtatttagaaggaaatgcattgatgttgccagtttactcagaaatgtacctcaacagtgcaccatgaaaggatgaatggcaggatgggtgaagggacggggcatgggtagatgggacgctccaaggcgggtccagtaaaatgacatagacatttatgccctagaaatgatttcaacattgccgtatgtttgaaatgtgggaccagtcgtttaaatcaatagaatgtaagtagtttcaatgctaacatgacagtcctacaacaggaccagcagctgtactttttttttatttttatgagacggagtttcttgttgcccaggctagagtgcaatggcgcaaatcacagctcactgcaacctccgcctcctgggttcaagcaattctcctgcctcagcctcctgagtagctgggattacaggcacgtgccaccacacctggctaatttttgtatttttagtagagaaggggtttcgccattttggccaggctggtctcaaactcctgacctcaggtgatccacccgccttggcctccccaggtgctgggattacaggcgtgaaccaccgcacccagcctgtactctttcataaacgtcaagacagatgaagaaaggtaaaacaatttgcctaagctgtgatttctaagtgaccctcttcactttgtcaaagcattcattcatgagaaaactatggaactcctgtgttcttgagaggctgcagtccggtgtgggaggcagagcagtggccagcacacagcatggtgaggcgacagagcgtgggggctctaataggaggtgagcagggcactcagccaggcgctggcgctcaaacctagtggaaggcagaaagagccatgaagaagtggacactattttactccagtaatagttcatttttattgtgtcaaacagtggactctacgtatattatattatttaacttttaacatatgcttaagagatgggcacaacttttgccaccgtatggtgggattagagcctaaaatagtaatagataacttgctctccaccagtgtgatgggcagcccaagatctgcacccagtctgttccagggcccagacctttacccactacattctcctttcttcttttcagtatcttcataacattctaatttttttgtagagatgggggtcttgctatgttgcccagactggtcttgaactggcctcatgtgatcctcccacttctgcctcaccaaatgctgagattaagatgttaggcaccacacaccaccatcaacattcttcttaacacatttttgtaaaccttgtggagccttccacttcagtgatgatcccatcaacagctaacatttaccaccttggcagaccgtaagtccaagacacaactcgacaggtatagactcaaagcagacatcatatctctgtgtataggaagacacattttctacagcctcatgccaccttctcaagtctctctggtcccaggacaatcgtaacatggagatggatggctggaagaacaggagcttgacagccaaaactccagacccaaagaggaatgcccctcgatgacatctcacccatcagctgctgcaaacttgcctgatcagtcgtgaaccccacttgaggagggacaccaactgttaagtctcacccattcttaggactgtcagtgtgaccaaagctgccacctgcagagcccaggagaggagtcctcgcctttaccccctttcccatctccatccttctccccgaagcccacagctcagtgccctctcctgaggaagcctctgatcccacagccaagcacaagatctaggcctgtgggcaccaacaggatggggctctgcagtcagggagcgtcagctcggtgcaggtacaggtgccttagtgacctataggtcaggggcatgacctatggaccgaatcgagccattcacagtgaggcctcacctgtcctgggatcgcaggcacacacagctccccacaaccactacacacacacacacacacacacacacacgcattttaaattcccatgaaaaaattaactttgcatatatgggccacatgcccttccacatcctgcttaaagcacctcaacagcccctaagttcctgttttgtcaaaatgacttgccctggaaccgggcacaggcaaggctgcccatgtgagtgtgagtctgttcacccatctctggtccacagcccacaccagggcctggtcaggctgcctcccatcgtcttctgcgagcaggcccagctggcatacacaggtggcgacctggaatcaagcaatcaagcaggtgccttctctcaggtcactcttccatacttgctgaggaaaaccacaaaagacctccaagctgcttgagttaaagtctccatttatttttatttttttacaaaaatccaatgtaagaccattgtgctcgtgacgaaaaggggtggggtggatggacgtggcatggatatcaaagcttccccccacaaactaggagctccccactctgtccggcgcagctcccagaaagatcccatccttccggacaggaccccagctggtgagccctggcctgaggcacagtccacacggaggagcactgcccagggagccagcgctcacagtggcctgcagagccctgggacggtgttatggtaagacagcccaaaccggagcagcaagccggccacccagagaacgaggcgctcctgcaccctgcgagccaggacaaggtggccaggggcggcccacagacagccaaggagacccggggtctgtggcgccgctttcccatctcaagcgagtcacaggtcggcggctttcccgtggtgagaagcacctgaccagtgacactgtggccaccttgctgcctctcgctgaggagggcgtgcccctcagagcctgtctgcagtccttcaagccagtgttcctttcagggtcaaggagggctgtccttgttggaagcaccggcaccacagccctccctgcggcatgttttggtgtcagaccactcagcccttcttagatccaccagtgacattcggggcccgacaacctggctccactaaagggagaggccctggctccaccacacagacggccccagctcactgagtcccgctaaagggggtcccaccacacagacggccccggctcaccgagtcccactgaagtcagtatgtgagttcctcacattaaaagaaaccagatgaaatagcagccacaatatagcgccacacaccacactctttggctccccgagggaagaaggctactgctaaaaggaatacaagtcaggagtcaggtagagggcaactagaaagttctgaggaagggcgtctgacccccactgctgggaacataaccacactgcctcagcaggggagctacaggctgatgctggggttgggggcggggaacctttggaaacacagtcctggcggcggccgggtccggtttgccaatggggagagttcccttaagccgagctagccctacaggtgggtgggagctacacaaaagagcccagcttcaaaacagtacttgaagaggacccacgtggtacaggcaggtcagaggagaacgtattccaagaaatagaagcacaggatgccaaggtctagggaagacggaactggcttaaggcatgtgcatgaccaggacaaacctgagcttttgttcagttgctagaaaacttccagagtcaactccacttccagaaagtagggttcaagaaacacgtcatgggctaaatccctgacaaatgccactcacaccctcctaggttcccctactgccaccatgacccaaaaaattagcttatttcagtttcagcccagggaacagaatcctaagcagggagtggaaagtggtaactcgggttgtgaatgcccgttagattccaaggctggatgtgagcttacacagcaaatcacagcctcccattgttctagcacataccaaacctcggggagtcctacagccaagctgacattaggggtccaaaaaccacagataacacaggatggggctccagacagaggcggggggaaggtgaatttcaccaaggaattatcccaaggcaggcgccttgctgtaaaacttcccggccagccgggtgggttcctcgaaggacactggcttgctctacactagggagaggaggctgacctgcaaaccacttcagaccacagcagatgtgcacgctgctgatctcctgtccaatccaagaaagagcacttcagaaacgcctgaggcccacagcacgtgtgtttcaacagaagagcaggatagaaagagccatctgggagtggcgtcttcagcccctattctttctcactctttgcttcctcattctctctcaaacaagagagaaatgggagagcagggataagtacggaggcaagcctggcctaaagataaatcctcaaaaatcgctggccccagcagcaggaagctgaacagcccaccagggtcaggcgctcccagggattcactgggaagagaatgtgagttacaggttgctgactggcaacagaaagggtaaggaagagaccttgtccaggcccgcaagagggccaagttcatccctttctggttgctgcacacagatggcgctggggaggatgggagatgatctttaaggataagccagtgacacaaggccaggacccatctccgccagaatacagaacaaaggagcctgcgcggtccctcccttagaaaggcaaaactcacactcccccagccaaaaatatatatgtatgcaagtgtgtgcatgtatttatatacacacacatatatataaataagccttgaatggcaaatctgaaactttctctttttaaataatcataatagttgttattgaatgtaaaaaccacgaaccagctgtcctgggcgtacgaacggtgtgagtgactctgcagagtcgccacagtcctcagtgtaagctatcagtcagtgccctgtgtggggaaccccggggactccgcccagggctccaggcccagtgtggctgacttcaagataaaggcagcggtttccttccactcctcctgctgccccttccagcagaggctctgggccacccaccagcagatgtgcccaaggtcctgcaatgcctaggaaccttgggagccatcttcctccctctgctcatcctcttccccagaccgtgcgctgcccctagatgaacttgaagcacttggtcttgtcatggggcaggcgtgtcttgaagagcacagaatccaccctgaactgcgtgtacaggaggggcatgtagccgtacaccttcacgaagaagttgatgcacttgtgccgctcgtggaagtgggagtcatcatgagacagggcctgagggcatcctgggcatcggaatgtccaccgtgaggtcacctggaaacgggagagagagacagagtgggaatcccagctaatactgacagaacccttgcagctgagccgatcccacactcccatgtccatggtgaagacgctgatcccctcaggggcaacatccctgcagagcatggcaggaaccagagcccggccccaggcctcctgcctaccagatgtctccagaacattgtcaggtattctgttgagatggcctacgcttctcagatgccaaaagccttaacgtgtgtagtgtcagctgtctcagtaagtctactcctagtatgtacttggttgcagagccataggtaggtaccgagttgtttgtttcatcaatgttttgaatcaaaatattgaagactacccaaagaggggctttgggtattgaagactacccaaagaggggctagtcaaagaggggctatcattcttgaatactgtccataaaaaagatgcttaactacatttaaagccatgggaaagtggccatactacagtctagtcatattattattaattagaaaatgtctaactaaaaaagtatgaagagggacagcttcattacaatgtggcaggccgaatggcataaaaacccctcagaacacctgaacatgcaagaagaaatacataaaccatctctttaaatacagggcagagcctgtaataagaaatgaaattacctggtgattaattccagcactttgggaggccaaggcaggaagatcgcttgagcccaggagtacaaaaccagcctgggcaacaaagcaaaacctcatctccacaagagataaaaatattagctgcgtgtggcagcaggccagctatctggtgtagtcccagctacttgggaggctgagatgggaggctgcttgagcccacgagtttgaggctgcaatgagctatgatggtaccactgcactccagcctgggtgacagtgagaccctgtcactcactcacatacatacatgcatgcatgaataaacaatgaataatgaatgaatgaatgaatgaatgaatgaatgaaatcctcagaggccaaacaatgaaaaagcaaatcctgcaagatagccatgaacttgggttttaaatgggctggagaagtgacacctgcaaagcgggctgggggcctttggaaacactggctccatggaggggagcagggaggggtggacgcctcacaaagaaagatggggaagaagtgtctttaaatttatcttctacttccttttcttttcacctaagtctgatctttttatcccatttcactgaaatttaataactatgattctcattttcaatagttccatttagggctttccaatctgtttgttctttttggagtgatttgttgcttttttatgttttcaggttactaattttaagcctacttgttttatagtctatctaatggctttattatttgaaatccttggagaactataacctgtttgttatatgtgttcactcctgctcatgatcagctgttttcttggtggctgactgttgactttacatttcaagctcatcttcaatgaggctttacctgtgcgtgtcctatgtgacctgaggtgaagaaatttctctttttcttaagtgggaacttcctctgctgagagtaatttctccttataacagatttttggttttattttgtcaaacagtccaagggtatcgacgactgggtctagttttcttttttgttttttccctggggactccccatattgcccaggctggtctggaactcctggcctcaagaaatcctcctgcctcagcctctcaacatgttgggattacagacttgagccatctcatgtggccctgggtctagatttcatacagaatgagtccctaagcccatggaggctcaaaagactatttaacattctcaacctacacttccccaacaacctgtcagagtcaaggttaaaataaacaaggtatgtgtcatctccccggggcaacgggtaggagatctccattctaattctccacccttaacaggctctacactccttcacatgagtgataaaatccaagcctctagacaactaaggtgagagcagccccccatggtggcctcagtgatgccaccacgcttgccaccctaagttttagtcctcccacctgcttcctttctggcaattctcttacctttttattagctcaactatacactgaaaaaataagtttgttacttatagtgatcaggttttcaaactacctaatccactatagtacaaaacccaaaaatttactgtcaagtttttttttttttttgagacagtctcactctgtctcccaggctggagtgcagtgcggtgatctcggctcactacgaactccgcctcccaggtttatgccattctcctgcctcagcctcccgagtagctgggactacaggcgcctgccaccacacctggctaattttttgtatttttagtagagattggttttgctgtgttagccaggatggtctcgatctcctgacctcgtgatctgcccgcctcagcctccccaagtgttgggattacaggcatgagccacagcgcccagcctactgtcaagtttttaaaaagcagactgcaaatcaagtatataaatttaaaatataaaaataaggccagatgtggtggttcccacctgtaatcccagcactttgggaggccaaggtgggcggatcacttgagctcagtttgaggccagcctggccaacatggcaagaccctgtttctactaaaaatacaaaaaaattagctgggcatggcgacacatgcctgtaatcccagctgctgtggaggcttaagcaggaaaatcacttgaacccgggaggcagaggttgcagtgacctgagatcgtgccactgcactgcagcctgggtgacagagcgaggctccatctcaaaaaaaaaaaaaaaaaagaaaaagaaaaaatacatatatacgtatttttacacacatatgtgtatatatatatgtatgtataaataaataagtcaccacgatagacaggataccagagaaccaaaagaaataagccaaaagttttggtacttttgatttctttctgcatgtctatcttttctcaaataatttttaaatttccattataaattaaggggaaattttttaattgaaagacacatcccataacttaatagtggaagagtaatcattgtgtacagccagtatgcgccgtcagagcccaggtcccagagtttaaactgggaggagacacaggccagtgctcaaagggtggctcccctcagaaccgagtctctggacagtcatgacctccacaggtccccctccagggtcccacctgtctcctcacttctcccctcactcactgctgctctcttagaacccttcggggtcacgtcagcactgagttattgctcttccacggttcccactggagcaggatgtaggggtcaggaatctggggaaggatgttctcaaacagcatctatgtccagtattccatggggctctcactggatctaaaaacctttctcatcattccagacaccagaatccaaccccaggagaaatgccctttaacctgcacattattccatgtgacacaaaaggtgactttataactgttgttttcacggaagcagtggtttccaaatgtttttaatcatgtaatccatcagtaaaaaaaacatttaagctgggtgcggtggctcacacctgtaatcccagcactttgggaggccaaggcgggcagatcacgaggtcaagagatcgagaccagcctggccaacatggtgaaaccccttctctactaaaaatataaaaattagcggggcgtggtggcacacgcctatagtcccagctactcagaagactgaggcaggaaaatcgcttgaacccgggaggcagaggttgcagtgagccgagattgcaccactgcactccagcctagcaaaagagcgagactccatctcaaaaaaagaaacaaaaaaccatttaagactgcatccccaatatatttgtaaatatataactgtgttacataataaaacatgcaaaaaatttaaaaagaatgaagcaactataatattaactgaagtctggacatttacttatttaaccaatatcgtggatcacagtttacatggaagattccaggtaactcaatctaagaaaaatattcgttttatgcttagtaacaatgaggaaaatccttgatagctgccaagaacctatatcaccccagagaaccaagacgttcacttgcatttcggcttccttaccacctaagccatctgttttctcaaaactttacaggtgacttttcaatctcttatcctgaatgaagcctatttatattctgtgttctccttgcaaaagtagtacattattcaaagaaataatatgacattaactccccattcgttagtcaatattaagatattaacattattgaaagaacactgccaatcatacgaagcagtcaaacctccctaactcaaacaaggaatagtttgacagtaaaaatttgaggtatttaaagcacaacaaaaaaattactatttttgaacataaaatagtacatatacctgataccattaaaattaggtaaataaaatatttaattcaaactggttctttattatgaagtaaataattagattcataagttgaaggaattactaagagttagaaaacactcttaatttcagcctttgaatttgaaaagtcatcccaatcttgaattcttcatatattccagaaagatgaagaaaattcacagagaatactcagttttgaagttttcacttggtaagaatcatgtgcaccatgtctaaattacttccacctgcactgaagagatggcttaactaatgaaacactggcctaataatgcagtagacaaacacactttaacaaagatgaaaaattccccatgtctgtgcctgctcaggtaactgatgctattattaggtacctaatcactcagatactttaaattttcatggaccatgtcttctggtctactagagaggcataaattgatgcatacatcttgactcaagtccagtccctggctacataagaaaggatatataaggaagagaaaattgcacccatcattaattgctttctaaaacctttgcctccctacctcaaagtctacaaaatcttttcactgtttaatatgagacctaccactgtacctggaaaacatactgtttttatataaatacttgtgactatttttcacaatttaaaaaaattgatacattatgttgctaattattcttctcttgtgaggctttagcagaagtctcggcaacagatgaaaccctgggacaatcaggagtgacatcctacgcaggggccacagttggcctccacatgcatttctttgttatgctttgctgcatggaaccagcgtcctctggtggccaccctgcttagcactcaagctacgacttctttctcactacaatgcccaggctggagtgcagtggctattcacagacacgcccatggcacattcagccttgaactcctggattcaagcaatcctcctggctcagcctcctgagtagctgagactaccaggcatgtgccactacacccagcttctaaagatgatttcattatcgttattagtacatgctggtgggtacttagtctagaacacaattattattattattattttctttttgagacggagtctcactcagtcacccaggctggagtgcactggcatgatctcagctcactgcaatctctgcctcctggattcaagcgattctcctgcctcagcctgctgagtagctgggattacaggcgcatgctactgtgtgtgcgtgtgtgtgtatttttttttttttttgagatggagtctcgctctgtcacccaggctggagtgcagtggcgcgatcttggcttactgcaacctccgcctccaggttcaagtgattctcctgccttggcctcctgagtagctgagactacaggtgcgtgccaccacgcctggctaattttttatatttttagtagagacaaggtttcaccgtgttagccaggatggtcttgagctcctgaccttgtgatccacctgcctcagccttccaaagtgctgggattataggcgtaagccactgcgcccagcctaatttgtatattttttagtagagtcggggtttcaccatgttggccaggctggtcacgaactcctgacctcaagtgatccgcctgcctcagcctccaaaagtgctgggattacaggcatgagccaccgcacccagtcgaacacaactatttactcatggcaatgtcacccatgaaggtaaacctatttcataaaattaaataatatgcctttttgataataatgaaaataagacctcattagtttgttgacccttctaaggacatcaggtataaatctcttactggaatttagcattttcttcaattatgaaacagacaaacacagacgaagcacagtcacaaatattcatttggagtgacagattctatagcattattggttctaataacatctgcttctgtgaggactgagctatcctaacccttaccagcatgctctaacttgctgacagagcccacaaagatgacaggaagggggtggaaccaggctttctgtgcactgagtgtatgtgttaatacctccaagaaaaaaacacaacaataccctcagaacttctagaattctgagggtatttttggttgtgagcaaataatttatatagtacttatgtgccaggcactattcttagagctttacatatattaactcagaaattcttaagttttttgtttgatggacatcgcctgtgcctctggcttggcaatctggtcaagactgtagactcctcaaagtaatgtttttaggtatataaactacaatacacaggatgacaaaggaaacgagttacagtaaaacacagtgacatacatgctcttttcttaatgtattaaatcacaacatctaggggaaagggagtaactgccgtgaattcaaagcagtaacaaatacaaacaatactttttgcagatattgcaataaaggtattgtgatatgaagatatcagtgatttctactggtgacaaatcagttactacaaatactcttatgaattatagcctgtttcataactgaagaaaatgctttattccagtaagacattaataaaaataatgatgcaacatctttcccacccaagttccaaaccttctgatttctatccattgcccttaggaatgaagggcccctgtagtaacaactcatttaagctcacagacaatcctttgatgaggtaggtagtatcatccctattgtacaaatgaggactctgaggtacagtgcagttacgtgctgcactactgcaaaacaagtgaagtaaacatgcacgcatccacagccccaccagtggtgggacctcaccttgatggggggcttccgagtgatgtgggagacaaggaagttcatggcaatgtcctcacagttgatgtattcatccaccatgtcccggatggcctggggcatcacataagaatacaggtaggcataatactgtcaggggaagaaaaagaaccacatgctgtgttacaagacacaggttgttggctttcagccaaaatatgcatggatggaggggctgtttgggtgtggcagtaactaggaggtattactggcacttagggactggggcaggggattcgagacatcctgtcgtgtggatcttctgcagtgaggaattatcccattcaaactgccatcatcaccccctttagtaacagaatgtcatatcatctccctggtaccgcagtgattttgaaatcaatacaaagatttgtcaaactaggtcagatgctggttcaattgaacactattttatctctaacaatggccaaaaaaaaaaaaaaagataagtgagagaaaaaagcctggttattttctcagacctcaataaatcacagaaccatgaaacacacgatccctcactgcctcctgtacagattcttgagtctggtcagtactcgccatcggccctggctactccctgctgccaaccaccttcgtctcttgcctggattctccacatcagctcctaaatattctccctgctgccatattctcttccccatgtgctagtcccagcgcagcaggtgattgtgttaacactcaaaccaactgaacatatcaccccttcgctccaaagcctccaacacttcccatctcactcagagtaaaaggcaaagttctcagactgtcctacaaggcccacagaggggtgtgttggagccactcacacctgctcatgaatggcgctttctacattttcagaatgttgtcagcttgttgttaaacatagccattattaaagatgtaattacataaacttcaaattaaataaattaaaattatattaaaaatccatgcaataaacaccttaaactcattacttcctagttaatattttactattaacttgaggttacctatatctactgttgatgttgaaattactatgtaatggtgtacaactgtgtatctcttcccaaatccgtgttcagtgactcatgttgataacttcaaatcagccaaggtaagagtatttataccatagaaatcagcaaatactacaagacagggcacatgttaactgctatatgttgcaatttgctgtaatgaacaaatgaataggtgaggtgcccagttaaactgattaactgatgaacatattgcattacctacaatataatatgttgagtgaaataatgataaaatttttttgtaacacagaataaatgtgctaattatcttatagcaaagtacttaagagttggtgaacttaaaaaaatgaattgtaattttttttttaacaaaaaggtgatccaggctgggcatggtggctcatgcctgtaatcccaacactttgtttgggaggccaaggtcggtgaaatgcttgagcccagaagttcaaggccagcctgggcaacacagggagaagaccccatagctacaaaaaaataaaaaattggccagatgtagtggcatgtgcctgtactgcctgctactcaggaggctgaggtgagaagatcacttgagcctgggagttctaggctgcactgagccatggttgtgccactgcaatccagcctgggtgacagtgagattctgtctcaaaaaaaaagagtaagaataaataaaataaaataaatacactttttaaaaaaggtaattcaaatttattgaccctttaaatggccagtgactgtccttcgtatgctgatgagaatatattaacataacacgtcttgaaagaaatgacattttaacaataagaactgccttttaataataatttaaaaaaaactgatgaaagcattatcagaataactgttcagaggtatttccatcagtatgtggttttgctgtcaaaaatgatttatgttgaccaggcgcagtggctcacgcctataatcccagcattttgggaggccaaggcgggtggatcacttgaggtcaggagttcgagaccagcctggccaacagggtgaatcccagctactggggaggctgaggcagaagaattgcttgaacccaggaggcagagactgcagtgagccaagattgcactactgtactccagcctggagaaagaagcgagaagactccatctcaaaaagaagagaaaaaaaaaagtttaatttagaaacagacctgacttgctataacacacagtatccaatcaagattttcaaaaataataaaacatattcaatcctactgctttcactaaaatttaagaattgagtgatcacattattttaaagttttgtttcatcgttatttcaacctctaaaaaatatctatcagtaatatacacatgcataaaatttataagtaaatatacatatatattaggtacaggtctaaaaagtgttattgacaggcacttatgattttaaaaaaaaagaaaaaaacttgacagctgttgatcagagaggaccaatctaactgctttcgtggaccaagcaagtaagacaaatgagtgtaaagaaatgggtgtaggccgggtgctgtggctcacgcctgtaatcccaacactttgggaggccaaagcgggcggatcatgaggtcaggagttcaagaccagcctgaccaacatggtgaaaacccatctctactaaaaatacaaaaattagccaggtgtggtggcatgctcctgtaatcccagctactcgggaggctgaggcagaattgcctaaacctaggaggtggaggttgcagggagccgagatggtgccactgcactccagcctgggccacacagcaaaactcagtctcataaaaataaaaaaagaaataggtgtaagaaaaacgaggagccacaggcaggtgagcgcatgaaggccccatcatgggcctcaactacaggagcagccgccatgacgccccagacaggacctcagaggacctgatcttcatttgtattgcagctcaggtctttttgtgaaatcttgtgatttttagaagttgtcagtgcataggacaacactagagggcccaaaaatctctctgtaagccaactgaggtttgggcgctgctagtctgtaatcttctttatagattttcacacaggaaaaatactaaatttcattaagtaaatgatttcttgaaagtagaggtacctgaccattcatggttttaaagaacagtctgaatctgggaaggcaattcagaagataagtacatcctcaaggtatgagtagacgctgctaagatcagtggctccttcttagctgagcaagtgtgaaaatcttggccagttgctgacaccctaatcctctgactctacttgcaatcctcagtccaaacaaggcccaccgaaggaaaggaagtcctgaggtgaagtgcaagaatgggatgagtgtatcaacttcacacattaagtttttaaaagaaaaagaacagctgaaagtttaacgactgcttaggctggttcaaacgtccctatatgtcaggcacggttcctcacatctgtaatcccaacactttgggaggctaaggcgggcagatcgcttgagtccaggagttcgagaccagcctaagcaacatggcgaaactgcatctctataaaaattaccaaaaaaaattagccaggtgtggtgatgcgtgcctgtagtcccagctacccaggagacagaggcaggagggtcacctgggcccaagaggtggaggctaaaatgagctgagaccccaccattacactccaacctgggcgacagtgagaccctgtcttaaaaaattaaaaaagtccctataaaaatgaattttattgttctatttgaggtgactggcaagatgccaccatctgagatgggagatatgtaagggagaaaagacttcaaggagctagggagagacggtgagctttcctgggaaaagtttacctgaagtgtctgagggacaaacgggagatatgctggaaacaatgaaatatacaaacgcagacctcagcaagaaaggccaaggctggaatacagatgaggaaattaccagcctgcagatgctaagaaaagcctcaaaaccttgtgtgtgagacagaacgcctagggaaaataagaagagcaacagaggctagaccccgggacacttcaccattcatgcagagagagtggtgggagggtcttccgtgaggacagtggaggcaccagaaccatggagggcatggatgcagacaaagagaaggaggcaggtgccaccgtctttggtgactgtcagggcacgatgaaaaggctggttgatggcagcaagacagacgacaggagctgcaaatgagactttatgtgacagctgggagggaagtgtcattggtaagcaatgaaaatgttccctacacctgccctgtgccaaagcacagatgtggggaaatgagtgcctcaaagtctacaggaaaaggctaatgggagcactgtcctcagagaagactcagggcacagaagaggtgctctgtgtggtgggcagtgggggtaatgccagggtaatcttagaacagggactcctcagggcccgggaacacttcaggagggaggtagagagcggcactcacggacacagaaggcaaaccacatacagcactgtaaactttctagaagctacatcgttaaaaagtaaaaagagacagtaaaaatcaataactgtatttaacccagtaatccaaactaactgcatttcaagatgcaatcaacacaaacaattactgagctatctgacaccctttgttacaagtttttgaaagctgttgtgcactttacactgaacagcacgtctccattctgaccagtcatgcaccaggtgatcagcagccacttgtggtcaggggccactttacaggatggaagaggtagagagggaagatgggccaggagaaaaaaacagaatacagaacagtagaggaggaaagactgcagggtcctaagcttcagatattcagtgaaaatcagattaggaggcacagtgaaagtaataagcactaaagcatcacaaagaactggcagagccacacagaggctcatcgtggggcccgggacaggcatggtatatctaagtcagaaaagtgcccaggtcaccttctgatggctgggccatatctagggtggcagtgttaaaactggaaggtatttgaggtgtcttttagcccagtgccctcagttttacaaacggagagccaacgcccagaaagataaagtggtttccaaatggcctatgtgcaactgtacaggcagccctctcatcttgactttttatcccagagttgctctaagcatcttgatcattgtctgtaaaaatagaaaaaactgacttctagcacaaaagaaacatgtaagaagcgttaggagagctaagctgagggcagcattccgctaccacacaaaggtgaaactctcaccaagtcgatgccattattaccagctttttcttaccttgtgaaagaaggcagcacctgtcagcaccatggacagctcacaggagtagttggagttgtagagccaggactgatgggggatgtcccatgcgtggtaacggccagggaagcccacgatgcggtcccgagcttctctccacacccttgaaaaacacaagtgcatacacagacctgaatacagagctctagggtcatcagaagtgttcacagttattgcctccaccttacaagctctggcccttaggcttttacttctcgtatcctttcaaaataaaacaaaatcaacaacaagccaaacaggataaaagcaaataaggtatcatattcagcttccttaataagcacctgcacattgtccctctagcagtcagcatcctccagcccttccagaaagaataagccctaagtttggaaaggggatctccagaatggggtatgtacaatatctactaaggagggctccagaatggggtatatacaataatctactaagcagcagaaagatgatatcaatttcaattctttttttagcttatttaatttccaagaaagggcttggtgggatggctcatgcctgtaacctcagcacttgggaggccaacacaggaggattgcttgaagcaaggagctggagaccagcctgggcaacatagcaagatcctgtctctacaaaaaaaaatttttgtttgtaattagctgggtatggtggagcacacctgtactaccagctacttgggaggctgaggtggaaggactgcctgattctaggagttcaaggctgcagttagctatgattgcaccacctcccttggcctgagcaacagagcaagatctggctctaaaaatgaatgaatgaacaagcattttctaagaaaggctttgtttttaataagcatgacatattagttcagaaggacatgtatgtaatttacatatattgcacacttttcttttacagagaaggaacataataaaaaggtttagagagcactggtttaaccacagaagactactgaactgcaccactcctaattccaaatttgagcagggctgacggagaaacatgtatgatgagaagtggcctacagaaccatacaactgaaaggtttcattaaatggaagaaataaatggagacttcagtatgtttcagtagaaacttctatatcatctccaaatttataggtaaattagaacaaataaaattggtccccagtttcacaggataaattggagaactgaaagcgtttaagctccacaggacctgacaggcctgcagaaaggctgccagagatttaaactgcctgcaaactccctcatcacttacatggaacttcagttcctaagacacagaagattttatttcaacagagttcctctcctaataagtctagaagcatctaatctaatccaaaagaggagaaatcacaacttctatcacaatgtaacagccttctaggtgggtttttttagacaactgattttttttaaattgtggcaaaacaaacataaaatataccatcttaatcatttttaaatgtatggttcagtggcattacggacattcacagtgtcgtgcaaccatccctgccatccatctccagaactctttcatcttcccaaacggaaactctgtccccattaaacactaatccccactcccaccttcccacagcccggcagcccctattctactctccgtctctatgaatgactacctaggggcctcacataatggaaccacagtatttatccctctgagttgtttgcacttctgttacaaataacgctgctctggccatttgtgtattcctttctgtatggacacatgctctcaagtctcttggtataccttttctgtcccttatgattgattgtatctgcctctttcttggctacctaagttgaagtgagtcaagatctatctttgccagaagaaagaattcttagacttaccctttcctttgaacttaggtctgtttcattcccattaaggtgaaataagcaaattggggagattaataagagaaaggttttagatcaaaggatgcccaaatgcatgagaaaagggtcagggtaggaaaaggttaggatgtatagacagcaatgataattcaccagctccattaccagaggctaaatctcaaacatgaatgacagttaagagacacattaaaaggcttcccattattctctcaccacctgcaaatctgctggaaaatagcacgggcaaggtaagaagtccctaaatcaggggcttggaagctatgttaatgccagctatgttaataggcttcaaactccttaaagctgggctccttatcaaaatcattcttggatctaagggttggcagttctcctgttaacactccacgactatgctcaccacgccagtccttcggcacgctccaaactgcatcacgctgcagcataaacacactccctaccgcccacccccaccactaccacctgcagcagcaaagatcatgcctggagttactgcatggcttttttcctttcataaaaacaagtggagagagtcagctacttattatcgtgtaaaaaaaatacacctcggtttaccaggattttttttttaatcacagctgtcaacagacttggttcaataatacactaagcaagaggtcaaaggaaatgtgagaggctgggtgggggagaataagaacagatgttctaatttttcagaaatgtgtcaaatcattctttacagatggatttaagacagatgagcaataaagcctctgctccttttatctgagcatctgctcttacaagcctaagccaaaggcagctccagagccaggtaggtcaggttaggccttcagtgaacagaatggaagcacagagaaagaactctctctatcctggatccacacttaatttgaaaaagatcgccaaagaaatctactccagtgttttttttgttttgttttgttttgttttgttttagctctgttgcccaggctagaagtggcatgatcttggctcactgcaacctccacctcctgggttcaagcaattctcctgtctcagcctcctgagtagctgggattacaggcgcacgccaacacgccccgctaatttttatatttttagtaaaggcagggtttcaccatgttggccaggctggtctcaaactcctgacctcaggtgatccacctgccttggcctcccaaaatgctgggattacaggcgtaagccactacacccggcctccagtggttttcaaatgatgtggggaagaactaatttttccccaaaattattatagattaatactttggtaaaatacaacaaaaatgaactgcctggtttcttaaatatgacatccaaagcacaagcaaccaaagaaaatagatccactgaacttcaaaacacgaaccctgtgcttcaaataataccatcaagaaagcaagaaaataacccatggaatgggagaaaattgtgcaactccaatcactgataatggacttgcatctagaatatataaagaactcttataacgtgataataaaaagacaatcctggcctggtgcggtggctcatgcctgtaatcccagcactttgggaggccgaggcgggcagatcacctgaggtcaggagttcgagaccagcctgaccaacatggtgaaaccctgtctctactaaaaatacaaacattagccaggcatggtggcaggcgcctgtagtcccagctacttgggaggctgaggcaggagaatggcgtgaactcgggaggtggagcttgcagtgagccaagatcacaccactgcactccagcctgggtaacagagcgagactctgtgtcagaaaaaaaaaaaaaaagacgacaatccaaacaaaaatgggcaaagaatgtgaaaagccgtttctccaaagaagatatacaaaggctaactgatcaataagcgcatgaaaagaagctcaacatcattgagagaaatgcaaatcacaactgtacggccgggtgctgtggctcatgcctgtaatcccagcacttgggaggcttgctcgaggccaggagtttcagaccagcttgaacaataaagtgagaacccatctgtacaaaaaaaaaaaaaaaatgtaaagattagccaggtgtggtaatgtgagcctgtagtccccgctactcaggaggatcacttgagcccaggagttcaaggttaccacatgctaagattgcaccactgcactccagcctcagcaacaatgtgagaccccatctgtgtgtgtgtgtatatatacacacatacacacacacacacatttatatataaaattagttatcactttacaatgactaggacggctataaattttgaaaatggaaaataacaagcattgacgaagatgtggagaagctagaaccttcatacactgctggtgagaatgcaatatggggctgccaccgtgaaaaacagcctgaccggctcaaaatgttaaagcagctatcatgatccacccacattactcttaggtatccactcaagaggaatgacatgttcatacaaaaacttgcgcatgaaggttcacagcattattcataatagccaagaaatagaaatgacccaaatatccatcaacagaaaatgaatgaagaactggtacctgggctgggcaccgtggctcatgcctgtaatcccagcactctgggaggccgaggcgggcaggttgcctgagctcaggagttcaagatcagcctgggcaacatggtgaaaccccatctctactaaaatacaaaaaataaaattagcttggcatggtggtggtccatacctgtaatcccagctactcgggaggctgacatgaaagaatcgcttgaacctgggaggcagaggttgcaatgagctgagatcaagccactgcactccagcctgcgcaacagagtgagactccatctcaaaataaaaaagaactggtacctgctacaagatggatgaaccttgaaaacatcatgttccgtgaaagaagagagtcacaaaaggccatgcatcgttgtacagttctatttatagaagatgtccagaataggcaaatctatagagatgcaaagattgagtggctacctaggactgaggggtttggagaaaaattgggagtggctgttaataggtacagggtttctttcagtggtgatgaagatttctaaaattaaccatggtgatgtttgcacaactctgaatatactaaaaccactgaattgtacacttaaatgagtgaattttatggggtatgaattatattgaagaaatgttgcaaaaaaaagaactgcaagaaaaataatcatatacttggatttcatagtaaatgtcaaattgctttacaagtttctgaatgcttaccctcaatttttgtacttacctcaccattaacaggtaacaaactgtccctaaaccaacatcccagtccctgagatacctggagtagccttcatctactccatcctcttccctgcagtgaccctcaagtgggatccttcagcaattcctaagactcaagaaggcaggagagttgaaggccgggtgcaggttgggagtgtgacaaacctgcatttgaacccagagctctgctgccactttctagcttctacgtggttctgttctcttctatctcaatttactcctacatgaaatggagacagctacaatttatgtcatcaaattttagaaggatgaatgagataagacaaagtcctaggctagtccctggcacacagtacgggttcaacatatgtttaccatcatcatcatcatcatcattaccaccacctccttttcctcctccccttctttttccttttaaatcattgcttctgacaccctccttcccccaaatctttttgggtccaggatcctggcactgttccattgctccaacacacagcaacatgtcacttttgccttcccattcctctaaaaacaaaaccctcctatttcctttagagaactaccctacccgttgcctctactctctgcccatgtggtttggatttaaggatgatacacctgcagcaccaggaacaggcaggtaaccagggtctagccaatcaaagaattccaccttcctggccacagaggaaaggcctgtgggaacacagagcggagcctacagatgaagagagatggactcctccaacgccatctacgagcctgcatccagccacgtcctacatcagccctgactatctgcaaggggttctcagttaccatcagccaaaaaattcattttgcagcctaatccaggttttctgtcacttgcaacctaaagttttgattggaaattagtctctcaccggaacccaaacatgatttcgtcatggcggaggtgagcatcgtcatcaatggacaggatggcctctgtctcaatttcattccagggtaagaatcggttgttcaaactgttcttctcagtacggaccacctgtgatgaggaaggaaaaacattaaaaattaaggctgtgttatgaaaggccaaacaaaatctgtatttaggtccaaggagaccatggctggatttactgaataattttgcctgatctccgcgcttgtaaaatctagcatatgcctttcaggaataaaagctgccttatacttcaataaatgtatatagatttaccttttaagcttcattcattagttagctaattttcttgtgaatcaagcaaaagctgaagattattttatacacgcaataaacacgatgtagggaaattaaaaacaactctcccaagagaacacaaggtggcagagtggatctgagattccaatggctatggaattcccagcatgcttgttaattttaaaacccaactcagaaacctcatgagtctgtcacttctgactccccaattctaacgcctttttgggatataaatcccaaaaaagagcacagcccatctggtcgagattagttacttcacctttgaaattcctacctacaatgctgactactcgtacacaaactttttccttcttttcaaggtatcatgtactcaagtacaacagcttctgcgtcttcagcaaatcccaattcaaaacacatctaagtgattcaacatacatgcaaagcagtatttccttcataaaacagaaactggtgcttcaaatagtacaactacataatgaaacaatttttatttaaccatatctcagttaagtatagtttacctacagtgtgggtgagtagctgtgttattcaccttgccacctaatactcatataaatgatgaccacagccagtacttggatggctcattttattcttagagtgtctttgtctaattagtccaaccaaaggggaaccattattttgttctcaaaccccaaaaacaaagagcatctcatgaagaataatctttttagaatgccacgaaaaatcaccttacttccaacagactattttacttgtactgagaacaacctctacctggcatgatgaattaactgcatccgaggacttaaatttatgaatggtttccaaggagctctgtgacctactagcatgtctcttcaacttcaaataccttctcttccatcctccccctggaggtccagttcagatgcctcttgccacaccctccttgccaggagaatcatttattctatattcttaatgcagagccctcatacttcaattaattcattctagcacacttaaaatccaattaattcagagctagaagggctttggagactatagcgtctgtcactttacacatgcagaaactgaggcccagagtgatgtcatacaactggcaagttgcaagagccaaaactctaattcataactttaaaaaaaaaaaaaaagcgagttctcgaagtctcatcactatgttccccccaggcgtctcgaactcctgagctcaagagatcctcctatctcggctccgaaagtgcaaggattacaggcatgagccaccacacccggtcctaactcatactttgattccaaacccagtccttttcctgataaacttttgttaactttataaacttcttcaaaccaaagccaccatagaaaatgcttttttttttttttttttttttttttgagatggagtctcactctgtcacccaggctggagtgcagtcgcgcaatcttggctcactgcagcctctgccctctgagttcaagtgattctcctgcctcagcctcccaagtagctgggattacaggcgcctaccaccacgcctggctatttttttgcatttttagtagagacggggtttcaccatcttggccaggctggtcttgaaatcctgacctcatgatccgcccaccttggcctcccaaagtgctgggactacaggcacgagccactgcgcccagacattttttttttttttttttttttttttgagatagagtctcactgtggcccagactggaatgcagtggtgtgatctcggctcactacaacttccacctgccaggctcaagtgatcctcctgcctcagcctcccaagtagctggaactacaagcagataccaccatgcccagctaatttttttatctttgtagagacagggtttcaccatattgcctaggctggtctcgaactcctgatctcatggcatctgcctgcctcagcctctcaaagtgctgggattacaggcatgagtcaccacacctggcctgaaaatgcattattaatctgtgtaccatcaagaaaaaacaatgttgccaattaagaaggcatgtgaaattgatgatcccttgtttacttgattacagaacttaaatttttttttcttttaagagatggagtcttgagttgtcacctaggctggagtgcaatggtgctatcatagctcactgcagcctagagctcattagctcaagtgattgatcctcttgtctcagctccccaagtagctgggacctacaggcatgcaccaccacacttgggtaatttcaaaaaaaacttgtagagacacgttctggctatgtagccttgactggcctcaaactcctggtctcaagcattccccctccctcagccttccaaaaaaagtgacaggattacaggcaagagtcaacactcttggccagagctttctttaagacttcacctcagccccagaggaggtcctgcccaactcaagacaaagaaggatctgtaacagattcaccaccacagttaacagatgtccaagccaagcaacagaccgagaaatccaccttgccctgcagcatgtctgaccagcataaaaattcccaagtgtacagcccagggtatcctaagctcagagtccacaatgacaaaacgaaggaccgagtgaggcctaggtcagacgagagagcagcaaggagagcagatgccaagtgctcaccttagcagctgtcggttccactcgccaaagggcgggagggtggcaagaaggggccggacttgaatggcaagctcagcaatggtaagaggccatccattgtaagacacatctcaatttcagagatgacaaaatgtaaaataaggtccgccttggaaatgacggcatatggtagctgttcacaaactccctcaacaaactcccctcgaacattcactttacctaacacacctagcattcactcagtacagaactgattctgccaattcagccaaacaaagctccccctcacacagcttaaaatgaagaaaaaccacttcagttcttgaatattggcttgtagattatcagttttgtgggttaaccttcaggtggattatctacggcacaattagtaaaccaggaatatagcaaggagcttcagagttcaaagtgtgaggcgaagaccagcagcacacaccaccggagcctgtaggagtgcaggcacaccccaagcccactgagtcagaatctgcattttaacatgcccctgggggattcctgtgcacattaaatggggagaagcactggtacagagggagaaagcatggctttggggccaatcagaaaagcttgggttcaaattccaactcctcctcttactagacgtgtgaatgccagcaccctctctgctaaatcaacatagcaccacactgtttgcaaaatctgaagttacttatcagccaaacttgacaatcctataaacaacctaactctgcacctgaaaacgaaaaacaagaaaaactacaatgatttgatatctagatcatatccaaaattatctaatttacaaacaaccaaatcaagagaacctacttgtgctttagaagacttaggtggggtcatgcagctggaggtcaaatatcaaagtgttttggcctagatttcacactagttttttttagtaagtttattaaagtccattacttagatatcaagaagcaacaagagaacaactactaaggactccaggaacacagggcgcctgccatctctgctcaccctctgagcacaactgctctgggctggatgacaacagctgttcaggtatagcaaactgcattttaacaatcagaacagcaatcagaataaaagggccaggcatggtggctcacacctgtaatcccagcactttgggaggccaaggcgggtggatcacctgaggtcaggagttcaagaccagcctggctaatatggcaaaaccccatctctactaaaaataattttttaaaaatctagccaggcatgggggagggcacctgtaatcccagttactcaggaggctgaggcaggagaatcgcttgaacccaggaagtggaggttacagtgagccaagattgcaccactgcactccacgctgggcaagtgattccgtctcaaaaaaaaaaaaaaaaaaaaaagaaaagaaaagctgttaaagattcacagaaacacaacaccaagcactacagttttgtcagttagctgacaaaactaactgcagtcagtaagtcagctttaagaattcagagcagtggttctcaaccaggaacaattttgcctcgggctacatgtggcaatgtctgaagggatttttggttgtcacaactggagaaaagggtgcgctacttgcgtctagtatctagtgggcagaagccagggatgctgccagatcctatagtgcacaagacagcccccacaacagagaattatctgacccaaaatgtcactgtgccactgctgaaacaccctgatttagagtcaacctgcaggaagacagtaaaccaaaacagcacttggaagactaactatagttcattacctaagatgttccccttttccctatagccgcaaaaagatttctgccctcacaaactttgcaaacgccaactaaaactaaatgggtggaagagtaaaagttttcttctaacagttttgcttcaaagctgcagtgcttaatggctaaacaaaagctcagcaaaccaactattatccattctggcaccaaaatcagaagaacagaaaggctcaaacatttctaaatgcaggccgggcgcagtggctcacgcctgtaatcccagcactttaggaggccgaggcgggcggatcacaaggtcaagagatccagaccatcctggccaacatagtgaaacccagtttttactaaaaatacaaaaattagccgggcgtggtggtgtgcgcctgtaatcccagctactcaggaggctgaggcaggagaattgcttgagcccgggaggcagaggctgcagtgagccgagattgtgccactgcaccacagcctgggtgagagagcgagactccatctcggaaaaaaaaaaaaaaaaacacttctaaatgcagactcacagatcagcacggcctctaagaatctgagaaaagacagatcgaacataaaagaaacaagtcaaccagagggactgtgtcatatttaggaaaggttctcatttttgttgatgttgttttgtttcaaatcaaaccaacactcttccctcaaccccacaatactggctatttcttcatgttactacagcatattgctattagatgccttatgattacatcttagtaacttgcaaacaggaagactcactttcaagtgattgctttaattactggtatgacattaaccaaaatgaatagaccacagtgcctggcaatatagcagatgttcaacaaatgttttataaatgaatgaatgggcagaaaatagaacataatttagccctgccattctatttacagaatatgaaataaagacttgagaagtttctagatcaaaattataggtaaacattcaatatctttaataatcttaaagaatgatagagaggaattaggaaacctcttagtatttagtgtagttttctatagcaaaaaacccatccacctccatcaagccaggagcaatgcccactctttgcttggcctgtctcacacacagggctccctgacggtgcctcgctagctcttctgcacaatatcattcacgggacccttgaccttctcctatcacaaaggaaaagggacagcaatcgtggcctggaacctgccacctatgaaatttggccatttaaatacacttgaaatgccccttttcagattacatccggcccagccaagcccgacaatctccatcctccaacaaaacatatatacgtacataatacatccctatagcaaatccatatctgagaatgaaacttaacatcaagccatcacacaggcaagaaaggaaacagcaactgaccttagttctccatcatccccttcctccaacttaaaagaggaaccatcagagaactcaggaatgaggaaaatgagatccaggaagaggcacacagtcatgcccacccagctcaggaggacctaggtaacagagcttgaagtgagtggggagggaggtgagcgatgggagggaggtgagcgacagagagaagatgatagaaagaggactacatcatcatcatcattattattattgagatggagtcttgccctgtcacccagactagagtgcagtggcacgatctcggctcactgcaacctctgcctcctgggttcaaacgattctcctgcctcagcctcctgagtagctgggattacaggcgtccgccactgcacctggctaatttttgtatttttttttctttttttcttcttcttctttttttttttttaaagcagagacagggtttcaccatcttggccaggctggtctcaaactcctgacctcgcgatccacccatctcggcctcccaaagtgctgggattacaggcgtgagccaccacacccagccaaggactacattatttaagggattcattcaataaacgtcaagtgatggggcagaaagcaagaaaacgcaaaggaagaaaagagaataagaaggtaacagtgcattggttttccatttataactttacacagggatgtcatacagtacaaacaaaattgtacatgttttagatgagacaaatctgttttaacttataagagaaaaagttgccaatgatcccagtgcaagtgcaggtaagaaagcctaggttagcaggtcaacaaatgagagaatgcagataaagaccatccacagtgcctagcacacagaaaatgcccaaaaactgttaacaattattataacatgatattagcagtctctattttaattttcatacattttacatgtatatttcatattctgtatgtattttaatttttatacattttctatattttatacatatctttatttaaaaaaacaagtttgtgcttctccaagaaatttacacgtggaaaaaaaaaaagaaaaaaaatacatatctattgtcagaagtcctaagacctggtgctggtggtggctcacacctgtaatcccagtactttgggaggcagaaatgggcagatcacctgaggtcaggagttcgagaccagcctggccaccatggcaaaatcctgactctactaaaaatacaaaaattagccaggcgtggtggtatgcgcctgtagtcccagctacaaaagaggctgaggtacaagaatcacttaaacctgggaggtggagactgcactgagccaagatcacaccactgtgctccagcctgggcaacagcgtgagactctgtctcaaaaaaaaaaaaaaaaaaaaacagtcctgagccctcattctaatacaggtatcagttagtcaagtgacctgaagcaacagaattcttacagtctcagattccttactttgaattagtaaaaagagtacacatacactaagaggggaagacattacctcaagaatcaatttgctgcaattagtaaattatgcaacatgactttccagcaattgctttaaacttctgtatttcttagtattcatttttggttcggggtagccttgttttatataattttcctttgcagccatacagcccattcgcaaacagaaacccacagctatagccaccaagttattaagtaaaatgttgtcaaagagaaagaccaaccacccagatgtgccagctcctagtgaagtgcaccagaccttgcacagtcttggacctggagaagctggacaaggtttttcctgctggcttcacctagctatcacaattttaggaaattatcgtctcattcgttcaagggatatttttaaaagtagagtgggcagaaataaaaaaatacagcttaccaacactttaaggagtaagccctgagaatgatctccactctcttgcctgaggtctagccagaagccaagcctcttagcctgagaggcggagtccccagccagaaagttcctgacgccaagagtgcactacggatgcagcttctcttccagtcttcccttttccctaatagactactggggagaggatgaaaataactcccctggaatgatatttatattacccaaaaaaagaactctccctgttcaatttgaatatcaagggctgggacagagggaaaagggcattgaaaaataataatcttgtatctctcttttttttttttttttttttttagagacagggtctccctctatcacccaggctggagcgcggtggcacaatcacagctcactgcagccttgacttaccaggctcaagcaatcccctcacctcggcttcccaagagcctggattacagacatgcatgatgcctggctaattttttctatttttttgtagagatggggtctccctatgttgcccaggctggtctcaaacccctaggctcaagcagtccacccacctcagtctcccaaagtgctgggattacaggcgtgagccactgcgcccggcactatcattttcatttggaaaaaaaatggtgcattctgacctcatcacttccacagagaccttgcagtctgcaaggatgtgtgctatgctgatctctgaactggttctctctaccaccgctcctcgcctaggctactgcaagtctttttgcttctgctcttttccccatagttccataaaaatcatgtgcctcctctgctcaacaccctccaagggcatcctaaggcagacaggataaaacccagacttcctaaccacgacctgcactgtcctgcacctgctggtcccactgccttctccaacctccttcaaacgcgccacccggatgcactgggcatcgcttctggtgcttgccattccccatacatccctccagaatttacatggcctcctctctcgcttcattcaggcttctgctcaaatgtcaccccttctaaaagcccccttccaaggcaccctgcgtcaattagccataccctttatgaagaagagaatgaaaacctaagactcagggacgggctgccaagagactgtctcagcagtcagtgagtatacagtgtgaagggaagtgatgccttgagtgagctagactacactgttagtaaatgaaagatgtccctttcctaacagcccacatgttacaactccaaaaggacagactctaaaacagccaccctacttactattttccagagtataaagcagagtaaggaagatgtgtaaactggtcagaataaagtagtaactcaaaccaaaatttttaatgggactatctatcaagaagggattacttggcatttctgcctccagaagagttcagtaagcccctgccagacccagtcctccctcagatgacaactataacctctgcacaaaaataccaaaaaaagaatttccagaaggcactagagagtgaacaaaagacaaccaattatggaggggtgctaaaattcagagggagggaattactgacacagggagaattactgttgctttcaccctgagagtaggccagagttggtaccaagaaagacagctaaaactctcatacaaaacccatggtctttctggcctgtaaaggaaatgtgtaaggtaaccacagcctgtagaaagaatggagaaaattccagacaggagaaagccagagagagggagctccaagttctgcgtagaaactgctctgtctctggcccacccctaagccatgcatgcttggtgcaggctgtaagcagaccagctacatataaaagaactcaacatgagagtggccattcacgagacagggctttcagtctgagtcaatacagctaaccacctactaaaacaaaaatatcaacactttccagaataaaaatcaaagaaaaccatgctaaggcataccacagtcaaactgctgaaaaccaaatacaaagaaaaaatttcaaaagtagccagagaaaaccacaccttacatataaggaaacaaaaatttgaaaaccactgatatatcctcagaaacaacggaggcctggaaacagtggaacatctttcaggtgccatgaaagtggtggtccccaacatagtggagagtttttcaaaaggctagacctcaaatcccttggcataataatactctctagttggctttcattagatatctttgttgttatgctccaggagctaagggacctgatccatgtgtttacaaaatatacaagagcaagggagagagcagacactcaccatcgcccctctgtttggtagtcctaccccattcaacgggagacccacttcaactggtggcacttctcccatctctctgcaagtcctgtctccttgccccgccaccatcccatttgtgctgaagttctctttacacagagcatttcaatcaggagtgttcaagggtggtggcaataaagatcaccttcactctaagctagatctttttatgcaaataattatttaaaagaatgaggaattttaacatataagtcctatggggcacccctaagacaatccttctccacttaaaatagctggggctcaatacacttcacagcccacaaacacccagcacttatgcctgttgcttagtgggaacctaaacataagaggagcccgtattgcccagcactttctgaaatggcacggaggttcctgggtagattcactgatgcctgggaacaaccctggtgctaaatttataaaaattaaccttagcgtattgaattggctacgtctacatctagaagaaaaacccactctgaggtgtatcacagtagtgccctttttctatagcagagagagctaccagtctctttctagctctgatagctgggtacatccgagatgtcagcaacttcaactgttccccagaacacccgcctctcctagatagaaagcacaaccacaatatttacaggatggagtgaaattctccatctgaagctatttcctcttttttaaaaggaccagaaaaaaaacttgtattgctaatatgagaaagctgtttagaatagcctatctgtaaagtttctggcattttccaattaggtattattgcgatgggctgcccaatagtcaggactacttatttcccatcagagtttttaaaaaaagattcattctggtaagttcttgatgaatttcagtcaacttaactggtatggcaccagcttctctacatccctatcaaaatcaaagaaaactcaggaaaaatggaaaacaatggctgctctattattctactatttgaggagcatctatctttcacagagcaaatgctttcttaatttcaatgacataaagttgtaacagaaagaaaaaaagtgaactttgagaagtctattaaaaaaattccctatttacaaaacttaatatacaaaatacactgggataaaaaggatttataaccctacagtctttgaatagcttctaattataaattcaattaaatttaaaaaaagattagcagcagtaagaaaaaatttaaagcaaagaggcactttgcacagaaggaagtaggcagtaacaactatgacacaaacagaaatgatgtagagaggatacaagaagcctttatgagtgaagtcagttaaagctgcccagagcataggcaagacaaacatactggcttccatctcctttaacattaagggataagaaggaatcaaataagtgagcacctttctagaatccttagttgtcttatcgtagtttcctctttaatgctgagatcaaaaaagctaattatcaaagatcacgaaatgactacttaatcccaggtctgtatcactccaaatctcatacttattacaccatgctgctgcttagaaaaataattcaaatgaattggcctcccagtgaagtacattttttaaaaaccgagacttctagcaacgtgtggcccatcagactttttgctaccttctgccaggaagtaactacatatgcagcaggttaaataggtggcagtctgcttaagacctgctctaaggctgcacatttaagagagatggtcgccatctctctcctagaatgccaagtttaattctgaagatggtaaactcctcagaactaaagccctgtcctgcatatttagctattatttttcctgtaaaatacagcacttaaccatgagatggagtaaagaatgagaaagaacctacaagacaccctggaaggttcaattggagttggttctccaactccaaaatatcaaaccccaactccagtcttccaaaagacttctatgaatacctggaaaatgacacaggccttcctaaaccctttgggaggtgactaaagctgccgcttctggaatcagacatactaaagctcagcttctccattactcaccatgatcttgggcaaattcattaacctaagcttcagctcccatacgaataagctgaagaaacagcgataatatgtcacaaaatgcttattatagtgcctagaggctaagtgcttcctaaatggtagcttatcattatcatcatcatcttgttatgacatggaagtctacgggataaccgacaaggttttgtatattgaatataaaatcagtttcagttttggggatcctcgatttaggaagtgagtaacagccacagaactgccaaggcttgaaaaagcagcaagcaaacccttcaggaagaaaggaatctatacaggtttttcatgagtatgcatgtattctcctctgctagaagttacgattgctaaagtgaaggaagttggaaaagggattaagagtgaaatactatttcatgcaccaaaacgaactgttcgtttctctattaccatgatggggacgccaatgtcaggccacagaaggtcctctgatggcagcttgggagaattccacaccaccacgaccttgttcaggtaagggaggccattcagcctctctaaagagttcataagcacttcctcccgctcataagtcaacatcaccaccgtgaactgctctcggggaacattgcctccaagcgctgcctgaaattccttgccagaacccccagctccaccaccaataggccgaaagccagtccctgagcccaagaatttggcctctgagggcaacacagggtcaaagggagtgtgggggaaaagatggaaaggccctggagcacagttccagctgcggtaaaagtcagtgacagtcagagtgaaattgcggaggtatctgggtgaggcgtagggcggctccgtctccactggccccaggtccaggtccccgttgtcagccatgttggggtcagttccagccgccttgcctgaacggtgggggatctcagctgccgcctcttcccggatgggagcggctgggatctggatgcgagtcctaatcatagccagcacggtattaaaaatactgtcagcagtggagaagtaagtctcccagagaaagcggccttgccgcctcatagccaggaggtcactatcggagaggcttctgagcaggaaatgaacctcggtaacacgaggctttggcaccaccagggccgcctcgttccactgcagcatgtcctggtagggaagctggacctgctcccccagcaccaccgggacggcaccgacttccagggcttcgaagagccgtgttgcacacccagaggaaataaccaagcgagggtccccgggggtaatgatgagggcgaaggtggagagcttcagcaattccaagcggtcctcccgctctccacacagtgcccactcagttggcaggctgggtttgggctggtttttgcaggtgaattccaccaggacctgatccagcttgctgtcctgcaccgccttcagggtggcaatgatccggtcatcgtagtcggcgggagggtcgccctccatttcctcttcgaaggagcgggcctcctgaaggctagacctcagagactcaatcttctcgccctggaaggtgaagagatatttccgcttcaccggcacctgtggtgggatttccatgaagttgggctcagacatggcatggaccagcggtgatacgaccaagtcaaagccaggtctgtactggacagtgtagaaggtggactgggccaccatggcacggccagtactgacgttatagagaaggttctgtgtatctgacttacgtgacagattgatgatgacatggttgtgtccatccgtccgccagtgtggcagggaatacaactgcttctccagctcagcaggccgcagcaccaccggctcctgcatctctcccactagtatcacgtaaaggcaggcgatgtctgcattttctgtaacataaacgttagctcgtgctgtcgcctgaaaagcctgcttgaccaagggatccaggtagctgccaaagacaaactggtcactgtcatagacgtagaccgggaagccagaggtgagagggcaacgagaataatcaaagcagttgtgtagccggcagccccgagtggccttcgggggagggaggccggcatcgtccttctctgggagcagtcggatgggcagggacagcttgggctggttctgggccatgagctccttgtaggaatgctcggtctggctgatgacattcttgagctggagcaggtcctgcttggcgttctcaatgctcttcttacaggcttcgatcttcagattcagcttggcgatctcgctgttcagctcttggcgcttggcctccagctgcaggagctcttcactcaccgactcccggatgcggcacagatccagcacgtgcttcacctcgcacagctcgttccccacccggggaccaaaaatccgcttgcctgcctcatcagcctcatccagagtggtgaggtaatagtgggcgatgagcgggaagaagaccaggatgacaaagagcgtgaagctgagccacgtgaggcggatgcggttggaccagcgcagcatgcaggtctgacctccgttccccgcgcccccattccgcagcatggtatagcctgtcatgagtcctctgcagcctgccccccagatcacgtcgggtcactcgccataaccatgggttgctattccacaaaacgatctctgtttcactgacacgtttccagaagagttagtgtgctccccagacaaggcaccaaataaaatgaacatttcattttcctcagctgcagctgaaatggtctctgaccctattccagcagattttaagttctggctgttgaccaaagaacatgtccttaatctttatcaaacgataaaaggtgccacattcttgctgagatgaaagggaggaggtacctgatgatgaaacccaggaaaaacaccctggaatcagacagactttttcaaatgccatagctcttgtttcttggttttgctgaccaacaaatatgcatagtgtctattcacagttatacagtaataggttagaacagaaataaatgccagcttcttatgatgcctttgccaacaatcaggcctgcaaaagaaagagaaccatgtcagtcttgaagaagttatgttcaacacccctgccaccatacatttctagaaaatgcttaaatcttagatggaacaatggctggaacactggctgtgtctcaaagaacattataatgacaatgcagagatgttgtttgctgtttggtataggtcttttacttggggtaataaatggataagtgccccaaaaagctgcagtttacaacccctccccacttcttatttaactggatctagagcggcattatagccctgtaacacgatgaccaactaaattcatgggacaaagatgtccatggtcttttcttatcctgttccacacctgggcatcatctttagatgaacagaaataccttcctagccaacctgggtagtttatgtttattcctaacctataagtcttctttggaaatactttacaaaaaaagactctgaaaagctcaatttgttaaatgtagagttgaaagggttgaagagaactcttttgatctttatccagtagtagatgcagtaatcctgagacaaaatgtatttcccagtttgcttctcatttatcttccattagcagacatcatgtgctctttcttaaaatataaatagtaacttgctcttttagaaagaacactatacttagaaatgagaggcattcgttctccttctttgctgacagatttgctatcagaccttggtttcctaatcttctaaaatggagataggtgcacggagacggcaatgcaccacgttgctgtgatacaaagtgcagtggatgggaggacgcttgtagcgactcagtccctcagcaacactcccagccctgctctctcaccaagcttcactgccactggctgcagaggcttgccacttgctttccctcaaattcaacacagctagaaacaaatcataatattctatgccagggaatattcccggtttctttttttaattcttccaaaaaatattcaccatactcttaacagggctaagacatgctaagtataactgtgggagaatctagggtgtataatccttgacctcatggaacttcccttaccctaagagataagatataaacaaacaagggtacacgtagcataaaatgagtaggacttcacagaggcacaaccactttctctagcttctacctctgtcaaagatgtttaactattaaaggtgtaatagtcttctctcctttttaccatttttataaacataattttaattatgtttcagaataaagattcctttaaacattctaacattttttcaagtaacatttgatttcatcgtaacattggacattaaattttaatctgtcaataaattataataacaatttctaaagacaaggggatattaggctgggcatggtggctcacacctgtaatcccagcactttgagaggccgaggcgagcggatctcctgaggtcaggagtttgagaccagcctggccaacatggcaaaaccccatctctactaaaaatacaaaattagctgggtgtggtggcacgcaactgtaatcccagctactcaggaggctgaggcaggagaatcgcctgaacccgggaggtggaggttgcagtgagccgagatcgcaccattgcactccagcccaggcaacaagagtgaaataccatctcaaaaaaaaaaaaaaaaaaaagaaagaaagaaaagaggatattagaatcagctaacagcaaagaatgagaggagggaaatgatggtgtgagtcactttgtccattacaaagaacacctgacaagacatcagacctaaagttgatgataatattactaaaaggtttaagtatttggataatctaaacttggataattagcagctgaccaaatactcaaatttacattatccttgtgattcaaatgtttaaatctcttgctttcaaaagaatcttctttgcacttatgaccaaattgtaacaaagaaacaacagaatggaagaaaaagaaaagaaggcgtaatcacagcaatccagctgactcattccttcctcaccatgtgtttcaggacccttccttcctctgacttgtgtagcattacacctcagcacacgacttcttgaaagagtgaacctccagggcttgctctcctgatttaaaaaaaaaaacaaaaaacaaaaatagaacagtgacatactattagaaaaatactcaatactgaaagtgctattaaagaacctatttactgtcccctatgaaaagatttctcttatgtacatgaggtcaccaaataatttactgtccaaacagagactctttgaagtggaaagggagactattaataaatacactgggacaagaggtatacacggggactctggcaggcaaaccgtccagacagacgttacctatttatgtgctctaagggggaataaaaccaaacactaaaatatggaaaagtccttacttgttgaaagtatatactgagatatttacagatgaaatgatatacctggaatttgcttcaaaataaacaggatgagggtggcggggaatgtttgcgggtagaaatgaacccaagatcggccgtgagctgactgctgttgacactgaatgatgggtacccatgggggcttattatatcaggctctcttttgtctaagtttgaaatttttcataccaaaaattctaaaagatactacatacagagtctaaacagaggttattaaaaagtcatttggagactgactatagttagtctaatatttctagtgctaccaacttacatataagcagagctgagggcagaaacaaatgttctcacagaaaccaataattcaacaatgattcaaaagaatgcatccccactaaattcccatctcttttactggagccaggcaaaagcatcatccatgtccaatagcatgagcattccttcctaaacagctaattaaattatttcaagcacaaaagaaaaaggataccctcagaatctcttctgtcattctctggaaaatgacaataaacatatcagcctctagaaataaatgtcactgaaacaatgataaggagcccttcagattttttttattccatatacaatgtacatgtctaattcattctcagtcacctgccacagcatttcatgcttaacttgccagctggcctccattcctgcccctacaatgcactccatacacagcaaccaggaccatcttgaaacatgagtcaggccacgcctcccctctcaatattttcaaggctgcccactgtactgccgggctccccagacccatctcagttaccatcgctcttccccttgctctctcagcttcagccacactggcctcctcttacctcctcgactgtgccaagcttctcgctctcaaaactttatgcctgttttgtctgaaatgttcttccccaggcttctgcctggcagactctttctcatccttcaggcctcaactttcctggcattaccatttaaagttgcctttcttaccccccgatgctctctggcaccgacccactgatttacttcctaatatcttgtaatttattaattccctcccttccccaccaaagcctaatcctcgaggggaggaaccctttgtgtctggatcactgctgcgtggccagcacccagcccagtgtccagcacactgtaaacactctataaatatttgttaaataaatgaatcctatcactgatcacttcctcatcctacaaactctcaattctcccctggacttccatgaagctgtgtttttttagtgttccatctacttccctgactcatcctccctttctgctttgctgggacccagtcctcctacctcatactgaaagtgttccccatggctctcaacataatgttaatgaatccattaacaaataatatattgtattgaatacattataaactacagagagagaacttcagagccaggaggcagctggatggccatatggacctgcagctagactacccggctcaggatgcagctcagccttgagaatttgggaatgttacataatctccctgagctcatttcctcctttgtaaagtgagtctgaaaatctctacctaccgccagggttattgcacaaattaagtaagatattatagatggaagaaaaaaaaatgggaacatggctaaaacagtgctaagaggaaaatttatgcataaattcttgcattgaagaaaagtctcaaatcaataacctatgctcctccttcaagaacccagaaaaaaaacaaaacaaacctaaagagcagaaatcaacgaaatcgaaaacagaaaagcagaagagaaaaatcaagaaaacaaagaggtttgtcactggtttgaaaaacctacaagaatgacaaagaaaaaagggaaaagacacaaatttccaatagcaggaatgaaacaggggctatcaccacagtccctgcaggctacaaacaactctatacacttcagtgaaatagaccaactccttggaaaacacaaagtaccacaactcatccaatagggaataatctgaattagttttataactattaagtaaactgacttcatacttttgaaaatcccaaaaaagaaatctccagccccagatggttcactgaagaattctactgaacatttaaagaaaaataaacacctactctacactgtctcttccagaggaaggaacacttcccagttcattttataaacctagcattgccctgactaaagccagacaaagacagtaccaaaataaagaataccacaagccaggcgctgcggcttatgcctgtaatcacaccactccagaaggctgaggggagaggatgacttgagaccagccctggcaacacagtgagaccccatctctaccaaaaaaaaaaaaatttaaattagccaggcatggtcccagctactagaggctgaggtgggaggtgagatcacacctgggtgacagagcaagaccttgcctcaaaaaaaaaaaaaaaaaagaaagaaagaaaactacaaaaaaaaaatctctcatgaatatagacataaaaatacttaacacaatattagggtaatcctatccagaagcataaaaattctccccacttacaccttcatttctcctatcaaagtgtcttgcgttctcacccatgctgtgcacctcatattaagtcagtctgcattttacacttcctgcccatgtcctctcctgcttctctttctctgaccccttttcaccactccccaaatgtagctgttcctgcaggcttgtcctcaacctcttttctgccttcacctcccagagcttgccaatgagcttcgcttagccccctgattggctgactctcaaatttacttttcccatcttcacctccctcctgataatcctttttccagtggtcagcaacacagacatctacacctcagacgttcaatggcagcaagcacatcttctatgactagaacaggatcatgacagtgtcttctcccaggggaaaaaaaattaaaatagttgtatacagagatttatcattcagattgtggccagcattctaccttttactcttttccctaatcagacatttttgctgacaaatgcaaagcagaagtcgccatctgctagctcctcattggagggctgaaccaagcagtagccctggaaagctgtaatgtaatcactccattcgagagtctgagcggtgggctgagaagtcggggctcagagttccaatccagaactgtgcacgtgctggtgttccccttcaccttctcgcccctccacctccacgtaccagggccctcctcctctcacatcccttatcacaatagcaaactgcgattatctgcaggaacattactcacggccttgctttcaagagtttgttgatataacaaccatcctacagactcgacttttctccttgtaaaactaaaacactgatattgaaacttcccattgcggatctgggatatgtctctatttaggtcttcttttgcatcttttaataaaactgtaaatttttttatatgcagaaaattatcagactactccaaaagaaagaaaaaaagttaaactacactaaaacactcacccggagagacaggagagacaggaggcgcgacagggaagaagggagtcactgctccatctggctgttatgccttccacgtggaaggtatgaagggagaacagagtgagaaacagagagagaggctagacgctttccagatgttcccaatgaaaccttcaacggcctctaatatcttaaataattatgataatagctaacaggtattgaatgcttactgtatgccgggttaaacctattaccatatattcctcaacacactcacttaatcctcacagcaatcccgtgaagtgggtttactgttattcctgttctgtacacgaggaaaccaaagcacagaggctaatgagccatgggtcacccatgttatgtggtaaaacttgaattcaaaccaaagcaagctggctgtaaagctcatacctttaatgccttaattatgttacactgtctatattaattcaagtaagagtgcgagcaggcacacacacacatgcctatcatgtgtatcatttttacattctccatatcactgctactccgctgtaaccatgaataataattacaattgacacacataatattcctctaaaacccaaaaccaacactatattcaaagtatttacctgctaaagagaatagcagactcagaacaaaagatgtttgccactgtgcctatggcccacctgtatatctgtgcttgtagtactattttctctttttcatttaggtcaaaataggcccatcaagtggcagaactccatgacaacccaggtgcgggttctacagagctgtctgcatgctgctgtcattgctgccatcaccaggagcccttccaattaggtaaagagagttctccacaggaaaccatttcagtgaggtcactgaaagcagtatttcagaggattgttttgtttttaagtactaacaacccaaaaaaacatcatttcctgatttcctaactacaggcatgacaaacagcctgtcaaggcaagacagtacctagttcgtgaagtcaggaagtatgttaataagcactaaaacacatttcccaacactatcactgatttgtcttctgtttaaaaaaaaaaaaaaaaaaaaaaggcacttcccagggaaactaattgtagataaagagtaagctctaagaactacatgtagacacttcccaagttacaggagaccaaggccctatgtttttcacaatccaacgaccacagtggtttcttactgtgtaacctagcctggatgaaaaaagggaaacagaacatcctcagcaattaaaaagcaaaacgaagtgtgaaaaactggttgtgccttgacctactgactgaagagtgaagattatgatgcaaccagagaaccagagtttgagccgcccttattacagggctgtttgaaagggaaaacaatttattctttgggcttaagagtaggtttctaaatcccaaggtgttccacaaatgccactagcagacaaatcacaaaatacaaaaggaactcatcaataagtggtgagcattccttccgctgctgaatatatagatattaacaaggaaaatgaggctattgattactccaagttatctgtttacttggcaacaaacctgggcccagaagtctcaactcccaggataagtcctcaatttgaaaattatgccattgccttatctgcttcccttcccaccagttcgctaatgtcccacaaatccaaatcgtattgttttaccagtcagtttaattatgtgtaaaaatcagattcaccacttaagaattttttcaaataacaaaccgggaccgtgctacattaactaaatcagaattcctaggtgtgggggaaaactcctgcagtttgacaaagttcccaggtgattttaatgcagagcacacaaccctaactccaaaactattggtctaatgaagaattgatagtaatggagattcagattgatggcagctcaatcaacatagacagctaaggaagacaaacagcactatcccttagctaacgcagaaagtccgcacttcaatgcaccacatacccttggaagatggggaggagagggctttttcataattgctactgatttatatttacagtgtgctaggcacagtactctagataacacacttcacacatacatttcatcagccacatgggagtactgtcatttccacttcaccgatgaagcagtggtgtatcaccgaggataggaaacttgttcaaggcaatacagcaaccaagttacaaatccaggtccgtatgacctacagccctgtatactgcttcttgcttatctaccatttgtttacttagaggattcattttgtcttaattcattttacaatcattatgtattacttttgtaattaaaaatattaccttgttgcaatctttttaaagaacacctcattacatttttcaataaataatgtgacacatctatttgggaaaaaaaataaagtcagattactgcatgacaaaccaaatccaaaaataagttccaggtggattcaagagttaattataataaatgaaccgtaacaagaaaaggaaaatatacatgtaatttcatctcaagtacagccacttttccaggaatccaagcaaaagtaaaatccagaaatgttcaacaggtttgactatataagaatcaaatgattctatgtattcagaaggaaaaaaaaaaagcttaaatttgattaaaaatggggaagcctgctcaatatgacagaattaaaagaaagcaatcaacagtggtcaacggacataaataagaagttacacaaaaaaagggttcaagtgataaacatgtttatatgtttaaccttcctagcgatcaaagaaatacacatttcaaacaagatactgtgatattttccactaataaatcatcaaagtattgtaaaattataatatctggtgctaagcaggatccagggtaaacattcccacacttggctgctgggattgcaaattggcacacctttctggagcacaatttggcagtaataaaaacactgaaactgtgtctatcctctttccctgtaattctatccgagaaattattcttaaagaatcatgagtgagaaaaaagatttaacttccaaaatgctcatactaaaacattaaaatagtgattaaagtacagtacaactctgaactatgctggctgctacaatgtggcaggtactcttgtgttagtagaaaggtaaactgaaaagtaatttgccatttgtaagaaaaaaaccttcaaaattttcttatctctgattcagcaatttcactttctaggaatatattttaggtgagcaagatttgtatgtaaagatgcaatcacctcattattctttatcatctgtataaaatatataaattaaatgtccaagactaggagcaaggttaaacaaagtgtgactgtcactgatatgactatgataccattaggaagcttttcaatggttttaaataaaatgaaaacatgttcacaatgttagctggaaaaatacagattcaaagccatatatgcagtataacatgtttaaaatgcatatgtatatatttctgaatagaaaaacaaacagaagcaaaaacaccaacagaggcacttctagattgtgaaattataggtgatttctgcattcttcctatctttctcactctccctcctaaaatgagatgcgtcattttcataagggctgggtagcgatgtagaaacaaggttttcaaataaggtcttcagatggattttgctaacttattctcagaacagtcaacttagtatgcaagtgcctagaatataaactaatctaacggttttcgcttctcaaacatacatgatttttattttatgctgtggaggcatacaattgatatcgttagtgccctgggcctccctgaatgagatagagaaagtgaagcaagtttgctaagccatacataaatcaggtttttcctttttttttttttttaagagacagggtcttactataatgttgctcaagctggtcttgaactcctggactcaaggtgatcctctcacctccgcctcccaaagtgctgggattacaggtgtgagccaccgtgcccagccttaaatcagcttatgactcgggcattctccttcaccctttgtgggtgaattcagcttgagacgctttaccatcccatcatcattaccatatttctgattcatcaggtcccctaacttcccaattcctcgttcttgactcataagctccttgtcctttgttaactcgtaaattaaggggttagaccggatgacctcaaagatccttttagactctaggccctcactgacaattgccttgctcccaggaagcacaaaaacatgttttgctgtggggaaaatttcaccaccctacctactcaaggcagcaaggccattcccaagacctccttctcgtttcacctccaagatttcaggcataaggctttaaggccccccttaattttccacagactccattaataatttgggatcccatcaactattttctccattcgaagccactgtgcttttatattttacagctctacttcagaaacaaaggaagccggatgcggcggctcacgcctatatcccagcactttgggaggctgaggtgggtggaagttcaagaccagcctggccaacttggtgaaacccagtctctactgaaaatacaaaattagccgggtgtggtggcacacacctgtaatgccagctacttgggaggttgaggcaggagaattacttgaacctgggaggcggaagtttgcagtcacctgagatcatgccattgcactctagcctgggcgaaaagagcgagacgccgtctcaatagaaaaattgaaaaaaaaaagaaaaagaaaagaagccatgctggaaagagtaggtcaaaattgctgaaaaaacatttaaaagcaagttggaaaagagactttaaagggaaaatggtcaaaaaagcaaacatccaggacgttaaccattaatattattgaccagtccaaaaggtattggacacagccaaatgaaggaatataccaaaggaaaggcatgtgtgtgaggggtggcactctaaggcaggcacccgcaagcggcagctgcctgcttttgtagataaagtttcactggaatacagctttgctcattcagttatggattccgtttgtatggctgcgtatagtaggcattcttatatattatgtatatgatgctttcactctccaacagattctacagttcatcttcctatggctccacttctagacttttgatgggtcatttgggtgcatgtgagtagtatcctacactgcactttatggcctaactgtgggagagggaagtatgttagtaatgagtctccccaatcctcttctattttcaagatcacaggttttttaaatcctgcttctcttctccctagtaacatcacccaagaggtctgaatgactgaaaatttaaaaggactgtgcaactggttcaggcaagaaaagaaaagatgaagcttacaggtgagcccacctctgtccctcttgagctcacaaactctctctgcctgggctatgctatttccatgaaacctccaaacgtgaaaaatcctttcttccctctcagtcagctgccctatcattgaaagtcttcgaaatgatagttgccgaaatgaaggggtaacaaaaataaaatagaaatatgttaatagaagttttctgagctaaacttaataaccagcgaatggagtaggcagttttaggacgttatgaaacgtcctggtttcatattcctcgcctcactctagagtaacatacaaaggcgctcgaacctttaccaagagtaggtctgatgggacttcatttttctcctaacacctgagtctacatcagggaatccctcccaccctcctccagaagaccaccagtctcaactgagacaaggactccgcatcactcctgcagcccctcatcacccataaccctccaatccacagctggcctagggcctgcggaaaagaacaggtctctctctagtcttctgctggcttcaaaccaccctctggacttgccctctctcctagaaatacatttcccatgctcggcctggcccctgacttacttctctccaaactgttcccttaaaatctttttactccgaggtcaaaactcttgaggcctaatcactgaaagatcccaactacacaccaagtattaacagggttttcccccactagaaaagcgagaagtggagggatacagacatacgcctgtcaatcattttttaggtaggtatgcccctcacatctctggacattaagcacgtttccggaagtctgaagagccacaattctgactcttccagaaagcacttaggctcgattctctcttgctcgtgagttcttatgattcctccggctccccacaagcaaacgaatgggaaattcccacaggataaggtatttttaacacatcaaataacagtttaagaaaacggtttttctttcatcacaaaatatttcaaagtccctctgctaaatagcaagtcgctgagaaggcttcgcttcgctccagactctgtgccccgcagttactatcccagcacacaggtcacagcgatagtcactgtatcagaatgcaggactcactgccgaacaaaatacagaaaactgcagagtctgcatggctgcaacacacaaagcctttaaaaacaaaagaaagcacggggagctctgccagtaaaaatgaagctacctaaattggacaaagaataggacaaagtgacaagaaatgctaaagacgactcttaagtaaatcacatatgggggaaataatggacatgttgtggtgttctgcgcttcctcctccaccaaaggagtcgaaccaagaggacttgatgaagcttttagagtttttaaaaagggaagaaaaatccaggttgcggggaagggcgggggtggggtggtgcgggtggcgggggaggggcaaaatccacaaaatttaagtcttctgagagccaaacagattttattaataaaaggagccgaagctctcgctcaatgtggggaagagaaagcagcacccatcagcagccgggcagccctggctcgcctccgaggggctcggaataggtgctgtccccgtcgctgggctcggagctccgccgcgcacacacgccccgcgcacccctgtccggtccagcccgtgcagcgcgaggccggctctaggggagctgggcctgggagccagggtcctgcagcacctggaccctcggacaggaagcggctcctctgactgtggctcctgaaaggaggcgagcccggcaaaaagagccagcggggagggcagcaggcgactgcgtgtagaagcggggggcagatgtgggaaggtgtgctcgggaaggggtgggggtagtccggagctgcgcctccgccgacagaagatgctccgggccagcagccagagaaacgccgcgggtcacagagggtggagggcttcagggagcagaggaagcccaacagctgcagccgagcgtccaaaaaaaggtggaggcgggtcccgagcagcccaaactgggacgagagagggcgtgtgggggcggggagggggtgccccagcccagggacccgttagccctcccggctgccggccgagggcctggcggcctctccccgggcccccgagccaccgggcaggcctactccgctcggaggctgcatgcctcccgccgccgggcagcagcagcctccccggggcacggcggacccggtccctcccgccgcgtccccagcgctcggggccagccccggcaccctcccatgagcccttccgggcgcggcccccgctcctcgggctcacgcgcggccagcagtcctaccggcttccagctcagggacccgccgccgccgccgccgccgcctgcgcgaaagtcggcgtcccagaagccgttctggctgccggccgcccgccttccaggccgcgcctgatccgccgctccccctgccggccggcagccatttccgacaggcgactgcggaacttgccgaagggcgccgcgccggaaatggccgaagccggcgttcgcgagcgggggcgcggacgcgggcgcgcgctcgccactttcccgaccgcgtccgaagaccgccgaggcctcccgcagctccgcggtgacacccgggtcaggggcgcggggccgggcgccggggattgtgggaggcgcgggggggcgcgccggccgccttcggagccccccaactcgcgtcctgcaaaggccgccgggccctgtcgagaagacccgaccgcagatggcggggaggatgctcccggcggcgtgggaaccgggtctgactcccgagccaccgccgcttccgcaggggcgccggccccgggaaagtcaagtcataaatccctgaatctaaaactccattctcagagaaaaggcctccaaggacgggcgccgtgcgcggcaactgcctgcagttttgaagccctttgactatttcataacaaagacaaggccgggcggcttggacgcttaggaaaatcctggggctttgcaaaaacaacaggttaatctagtcgtgtgggatgatcaccaaaacaagacaggaaagaagaacaccgtgtcaatgctgaaaagccagcccctgtgagccccaaagtgcacgttttccacagtcccaaggaacacgtgactgtgtgtttccacacttgagaagtcaggataagaccccttggataatggaacaggggatgggggtgggagcaagcaccctacctggtcacctgcttaacttagaaaccagcttttaaaacctgtaactgcagtatgagctacgatcaaatttgtcttaacgtattttttttaatgtttttaatacccagaacacagggcttctactccagggtttcctcgccagggaaccccaaacacacaggacctggagaagccgggtagagctggctcctggccctgcgcttgggtggtcggctgccttaagaagaactgcaccccagagacaggctcgcagctgccgaccttatccactcgccctttctgctggagcccaggcccagtgctccagcaaggaggctgagaaaatgctgaagactgatgcccacgggggacagcttgggctaaggataacgtttgcaaaacaaacctttaaaaacccatagcaacctgtttcctagagcacactcttcatctctccacccccaaactagtcccgactcggatcctccttttcctatcctctttctcttgctctcccgtctcctattcacttttcctctcctttcctcttgattattataaacaaatgctttccaagtcttaccgccatcatatgtgtacatatgcaacccttactgttaccaatttgttgaagtcaagacaggaggaggcaaagtttaaaaatcagaagcattgcaggaaatgaaaatggagtgagtgttgcctgggtatcataatttttttttttttttaacagttcctctacttggctctcctccaaaggtacgcggccacagcaggcaggggcttggcagtgtgggaggagacaccacagaagacagggaagaactaccaggccttggttcatctccacactggcgagagaggacgtgcagttacctgctacctgttcgactcagtcttttacgttggagtaacaacacattgctgcccttaactttgacttacttgcttttaaagatgatgaagctggccaggcgccgtgactcatacctataatcccagcattttgggaggcccaggcaggtggatcacgaggtcagcagttcaagaccagcctggccaacatggtgaaaccctgtctctaccaaaaatacaaaaattagctgggcgtggtggcgcgtgcctataatcccagctactcaggaggctgaggcaggagaatcacttgaacccgggaggcagaggttgcagggagccgagatcgcaccactgcactccagcctgggcaatagagcaagtctccatctagggaacaacaacaacaaaaagattatgaagccttaggaagaacagggatattcacctgctgctgagcccccctccgctttgatcttgtgagtctgcactctcctgctcccctgtctgtctcctctagctcctgttccttctcctaccttgtgttctctgccaatgatatgactggggctactttcttttttccttctcacactctcttcttgctaatttcaaccaatttccctgcatcatctccacctgcaagctggtcctttacagcagagcttggggccctgctgcccagtagcactctggacaccctcacatcatcatcatcatcctatttttatttattttttggaaacagggtcttgctctgtcgcccacactggagtgtagtagtgcagtagtgcgatcacggctcactgcagccccgatgtccctgggctcagatgttcctcccgcctcagcctctggaataactgggaccatagatcccttccactgtgcctaatttttgttttttgtttttgtttttgttttgagacggagtctcactcttcttgcccaggctggagtgcagtggcatgatctcgactctctgcaaactctgcctcccgggttcaagtgatctcctgccccaccctcccgagtaactgggattacaggcacgcactactgtgcccagctaatttttgtatttttagtagagacagggtttcaccatgttggccaggctggtctcaaactcctgacctcaagtgatccgcccacctcggcctcccaaagtgctgggattacaggcatgagccaccacgcccggcctaatttttgttttgttttgtttttttgtagagacggggttgcaaccatgttgaccaggctggtctcaaattcctgagcttaagcaatcagcctgtcttggcctcccaaagtgctaggatacaggcgtgagccaccacgcggggccttcatcaccctattaatatatactttctgatacttaattgccaggcaataagctaaacccttttattcactgtctcactttaatccttacagggaagtatcggctgccagatagggagctgagacttcaagaagctaaataaggtgtccaacaccacagagcatggagcaaaggacacgggactgcaaatcttcctaactcgtgtgctcatctggctatctcaccagggccttaaatttaatatatcccaaactgaactcatctttaccccttcccactttgcactcctcaaatgtccttgtttaaaatagttacctttatctttcctaacccagaaactcaaaacctggcatcatctttgacttctctctttaccttcacattcaacagtttccaagacttaaaggctttatttgtaggatctctaccactgatcctctacagtttcacacctacatcccattctcgttcccaaatccccataactcctctcctggcccatcccttaacactgaaatcctggcttggaaaatatggtcacattcacagcagctgtccccaagaaggaagccaaggcaacagtatgcacaatgaagtgagtcttcactgatctctccatattttgacattttacagcacttattatctctactttgtattttgaaactgaatccaaaatagttttgcatttgttgtttaacagtcatgtatgtagttttttttttttttttctttttttttggagacagagtctggctctgtcacccaggctggagtgcagtggcgtgattttggctcactgcaacctccgccttctgggttcaagcagttctcgtgcctccctgagcagctgggaatacaagcatacaccaccatgcccagctaatttatttttagtagagatgggatttcaccatgttgcccaggctgatcttgaactcctgaggtcaggcaatctgcccacctcagcctcccaaagtgctgggattacaggcatcagccaccacacccagcccctccatgtgtgtagatatttatccacatccaaaaattaggaaaagcaggacgcattgaacctttggtacccagcagcaggagcctgtgggtcttctgtctggagcacaatcacaaggaccgagcatcagcagcatccactgtcctttcagctccaaattttaaactcccgtaagagagacattattggcccagcttgggtcgtgtgtccacccctttaatcaatcagctttggccaagcagcaggtcatcctggtccaaacatcacagttgggggcctcacttgtaaatagagcttgttcccaaaaaagagggaggcacacaccattcatttgtttattcattcattcaatcagcaaatagttgagcatctatagaaatatatttaaggttctattatgtacacaaaatgtataaaacatggccctgccctcacaccatgaaagttaccacataaaaagaagtcaccagataaaaaaagcataacagtattcataagtactcatgagtgaccatcaattcagttacacatgatggaagataattcattatacctagtataagccagtgacggtaaaaatagttagcagcaatgtgtacatgatcaacaaaagctcacagcagcaccatttacacaaaaacagaaaagtacccagatgtccatcagaggtagaccagataaaatataaaatataccaccacacaatggctaacacctgtaatcccagcactttgggaggctgaggccggcagatcacttgaggtcaggagtttgagaccagcctgatcaacatggtgaaaccctgtctctactaaaaatacaaaaattagccagttgtcatggcatgtgcctgtaatcccagctactcaggaggccgaggcaagagaatcgcttgaacctgggaggccaaggttgcagtgagccgagatcacaccactgcactccagcctgggtaaaaaagcgagattccatctcgaaaaaaaaaaagtgtatatgtatagtgtatgcatgcacagaatactttacagcaataagaatgagtgttctgcaaatatacacaatattgctgactctcccaatgttaaacaaaagcatccagacacacaacaatgtgtacagtatattattccattgatagaaagcttaaaaacaggcaaaattaattcacccttatggagtcttaagtaaggggaacaaaaggggccatctgggcagtgataatgctgtttcttgagctgggtgctgggttcacaggtgtgttcagtttgtcacattcatcaagcttacacttctcatacatcttcttttctatatgtatgtcatccttcaataaaaagtttttaaaaaataaataattgggcttgtgtggtgggctcacacctgtaatcctagcactttgggaggctgatgtgggagaagcacttgagtccaggagtttgaccagcctgggcaacacaggaagaccctgtctccacaaaaaatttttaaaagcctggcatggtggcacacttaggtgggtaaggtgggaggatcgcttgagccaggaggttgaggctgcagtgagccgtgatcgcaccactgcactccagcctgagtgacaaagtgagaccatgtcttaaaaaaataaaaataaataattggcactcaaagtaagacacctttaatctcccttgaacatcagcaccatgattatcctggagttgccaattattcccacactccccacctcctccccatcaccaccaccattatgcccccttcttagacacataagacactggagcctttggaaggagccactatatttaccgcatgacctccttccctctggtcccagcctactggacttcttacctggaattgtgggaacaggtcactgtaactaagtcacgtgacagagtgcttgatctattaatttacacatatttgcaagaaagaatttctgggcatgtgcacagtgataagctcagaaagctggtctgcagaaaacagaagcaaatagagtcagcatagagagggaaacaaacaaacccaccagagatggagaagcctcagaggctgttgacattgacctgtggtacccacatgtcccaggtgacactgggtgtccacgtgattgcttatgtagccttactatttaaaaaatcctcataatcccagcactttaggaggccgaggcgggtgtatcacaaggtcaggagttcaagaccagcctgaccaacatggtgaaaccccatctctactaaaaatacaaaaattagccaggcatggtggtgggtgcctgtaatcccagctactcgggaggctgaggcagagaatcacttgaacccaggaggcagaggttgcagtgagccaagatgccgccactgcactgtagcctgagtgacaagagcaaaactccgcctcaaaaaaaaaaaaaaaaatcctcatttacttaaactaacatgaatacgtttctgtctccggccaccaaacatgaccctgcatgttcttccctggaagaaactaagtagttattttgtttgtttgtttatttggagacagagtcttactctgccacccaggctgaagtgcagtggcgtgatctcagctcagttttggcaacctctgcctcctgggttcaagaaattctcctgcttcagcctcccgagtagctggattacaggcatgtgccaccacgcccagctagttttctgtatttttagtagaaatggggtttcgccaggttgcccagtctggtctcgaactcctgagctcaggcaacctgcctgctttggcctcccaaagtgctgggattacaggtgtgagccactgtgcccagccccttagttatttcagagccagactcttaagcactttgcatgtgtcatcccatgtgctcctttaacgaccctaaacaataaggaccattattagtcctttgtcacaaatgagaaaaatgaagcccagggaggttaactaatttgcctaaatcaccagcctagtaagtggtggtgccaggttttggaccctgacagtctaactccagagcctgaaactttaccagctgtgctccgctgtggtgcaagagaaatgctgaccatggcgatgtgaattgtctgctgcattagtagatttaacaaaggcatttgatttgttaaatgagttcaaatgtagaaatgatacaaaagatcggctgtctagagaagctggtgcacacatttctttcacaagggaattatcgtttgaggtatacaagccagagaaatgtaaactgcatagagtgtgacagatatgccaaacaagtctgtgttctcttaccaataaattagtttacagatttcagcaaatgctctcttgggggcccccactgattgcttatttttccccacgtgtttaatatccaggagaaggggatttgagtcccacagaaggagaaactggtgataacagttacttcaagtctcagagagggaggtgcctcattttccatgttaatggctgccagccccacaatccactcagcaagccttctagatcaatcccaaacaagccattggtgacccccagcaatcttcaaagggaattatcagtgaggttaagtcagataagaacttagtctatttgtaaggctttgattttaaaagaaagtgctgacagccactattcaagatcttttctatatataaatgactgagcaattttgtggcttataattagaacaatgcatgacaatttctagattgaggttccaaggttactcttctctttggtctatcagtgccaaaaagccaaaaggtcatcttctaaggctccagggatagcactcattaccctgataaatggctcactctagaagtcctggctttgatgttaccttttaaaagtggctggtttttgtctggccaaaggtggggccatttgggtggctcacagataatttgtggcaacactgagttaatatcagtttcaagacaaaacacattttattgttaagaaactatttgttaactcattacctcatgtcatagtattctctgccttgccatgtggctataaaaaaaaaaataaacattcaagtttcacattagaaagcttagcctgattcaaatctgttttctgtggctgggcactgtggctcatgcctataatcccagcacttttgggaggcagaggtggggggatcacctgaagtcaggagtttgagaccacactggccaacatggcaaaaacccacctctactgaaaatacaaaaattatcctggtgtggtggcgggcgcctgtaatcccagctacttaggagcctgaggcaggagaattgcttgaacctgggaggcggagggtgctgtgagccgagattatgccattgcactccagcctgggtgacagagcaagactccatctcaaaaaaaaaaaaaaaaaaatctgttatctgcataagacacctaacctgtaatgaccaattaagactcaaattagctagcgccaacagcgggtatcaaaatgccatcaaaattttctaagcttgcacctacaaatgttccctaaggcaagcataaaggcatctaacatttaccctaaattatgccagtgagtagcaaaaatgtgctcagttagacgcaacatgtcacaacatggtctgactgttggaagaacttagtgcagggagagctatacccagaggaaagaagtaaaattaggcagagtgttgatggctgagttccagtgtcacatttatatacagctcaatgactctagaattgtccttacaccaaaaaaaagttattcatagattcaaaaaatcaactgctcactactttcatttaaaaatgccttgtgtgaacaaggcgttccaactgaaaactggcagaattcatagaggttcttaaagaacatcaattagattcttagtcaaccaatttggctgtaaaatcaaaactgaaagtgcaatttccaaaactaattatgctaaatacttttaaatatatataacttgataataacatttggactttatgtatggaaagaaacagtagtttccaccacaggaattttcaaaagaaaaatatataggttttaaaccaatttatgaagatctgcaataagattttattgaagagaaagttttcccctattttcctaaatattactcaaaattaattctcaacccaaaaggtgacagcatgattctagtagggtccaagtcaatcccagaacacaataataattgatcccttccccaacccaagccttcagccttgcaaacactatgccatagatcaaaagtggaaccaaatgaaaatgtgaccatatttctacaaatccatcaatttggagggcaaaaaaccaacaatccaaagcccatctctaatggacagtgttagatatttcaccctcatgtcaaaagaaacatgtataattacatcatctaggttactaagaaaagcatatctttaaagtgaaggggtatttagaaaaaggatacttgacataaatgatgcaaatactcaaaaaatatattaaatatctgtgaaatgtgttaactatgaaagctttttaaaagcacatgctgagccttgtcttactttcgtgtacatttaaccaggcttcaataatgctctatttatctttatttcattaattaaataataaatatctaaatttttttattttttgagacagagtttcgctgttgccccccaggctggagtgcaacagtgtgatctcggcacaccacaacttctgcctcccgggttcaagtgattctcctgcctcagcctcccgagtagctgggattacaggctcgcgccaccacgcctggctaattttgtatttttagtagagatggggcttctccatgttggtcaggctggtctcgaactcccgacctcaggtgatccacccacctcagcctcccaaagtgctgggattacaggcgtgagccaccgtgcccggccaacatctacatattagtaggaacacaatagcaaaaaaaaaaaaaaaaaaaaaaatcacaaaaactgataaatatttaccaactctgtggcttccttccagctcatgagcataattttataaaattgctatctctatgtgtcaaccatttcaagtccttctttttcacttactttgaatgaagtattatgtttctacatgatcttcacagtcatcttgaaagttactggagcatcctatggtctagctcagtgattcctgaataacagtttattgaccaagctaggatgaagttttcatcagtccacagttaaatgcgaaaagcacagacaagtttgtgagtttttaacaaagctgaatgattcaattgaaaggattagactttattctgagattatgttattctcccttttttatgttaaaatgtgtttttatgaaatgaccatggtggtggtcaacggcagctttttctgtatctttctcactcaacaaaacactgaaatatactaattttggtatcccctacccagttattttttattttactggtctattaaacctaaaagtctggtaactataataccagtctagcctgtctaacaacacacatatatattaaggcatacacttccccccaacttcacccctgcaatacagaatgtttttggagactcccatggcagccagcctctgaaagggcccccaatgatccctgccccctggtattcacacagttgtgaagtctccacccacaccctaactaggatccatctgtgtggccaatggaacacagcaaaagtgaaggtatgtcactcccaggattaaacgacacaaggcatttcagcttccatcttggttgctttctccttcttagatcactctgggagaaactcactgccatgttgtgacaacactatggagacgcccaggtgagggactgaggcttcctgccaacagccacatgaataagattgggaacagatcctccagccccagtcaagccttcagatgactgcagtctcatgaaagaccctgtgccaaaaccacccagcttgatgaaataatctgtacaacaaacccccatgacacaagtttactacaacaaacctgcacatgtacccctgaacttaaaagttaaaacaaaaccaccaccaccaccaccaccacccagaaaaaacacccagctaagccacttctgaattcctaacctacagaaactatgaaataataaatatttgtattttcaaaattagctgggtgtggtgccatgtgcttataatcccagctacttgagaggctgaggcatgagaatcacttgaacctgagaggcagaggttgcagtgagccaagattgtgccactgcaatccagcctgggcagcagagcgagactctctcaaaaaaaagaaaaaagaaagaaagagagaagaaaaattaaaattaatgtgtagaatattttttaaattaaagttaaataaataaatatttgtactttcaaccatcaagtttgaggtaatttgttattgaccaatagataataaatacaacccttttatcctatttcagccacaaaatgagcatccctgtagccccccagggatgcaatgtggtgcaatgcagaaactgtatttatggctgagttggaagagagatcggatcagcaaagactgtgatctcctttaccctggctttagtttacatactctgacttttttcttctctgttgctttttctacttttcttgtattgaccagggtactcagtaaactgaataatccatctctagcaagggactcaatcctgcaagtttatatgcttaaaggaattactttatgtaaatatggtattttatgaaattttagaaaactggtaaatgtctattgacagaatccctaaccccagctgtccaaatctttgctagactcatccataccttaaaagaggagcatgtcttatatttcactaagaaaatagaagacaacagatatgaactctttgaaatgccttccttccacctttaaaactataagtattgaggtgaaaactattattttagtagatgctagagttcttagggatggaaaatgccttatttaggaaactactttgaaatgacatttgaagtatggaaaaagagagaatgacttagaataaaactctgaagcaaagagacagctagtcagatctatattttttaaaatccaaaaacatggggactggaggagaggaaatggaggtggataagaagagatggggctcaaataacagtgtgggaggctggagctgcgggagagagttcccagtgataggggagccggagaatgtttaaaatagagatatctattgtcggaattttaagttatttgtgttgctaaggatataaaatcccctaagccttcagtaatatctgtcacatgcacaaatgccttatgtgagtgatttgggggagaattacgaaaaaagattgcaaggggctgagctccacaactgggtcagcaaagaaccaagaaatgagaacagccacagaagttcagatacaagtaagataaagaatttaatggaagcagaaactcaaagccaaagaaaccataagaaggagagcttccaggaattcacagaaatcttggattgagtttcccaatggatgcagaatggggacttaagccaatgttacttaaatctcagaaaagaatgttgccttaagctgacagctgagtacatattcactgattcttctttcatctcttccggcccttgacaaagagatgtccttaactcctttctgaaactaggtgctccatttttgaatgtgatctaatatccttcctttaactcttgcttgatcagttattctctttgctacatacatggtcaataacctccttactatagcgttttacccccattctgcttataaacaggttcagtctcaggcctggggaaaataagagaataactcagctcaagctaccatcatcttacaacacgggctctgaacccagaaagatttagatttgaatccttgttccactatgtattcatggtggaacaccctgggcatattacataacctctctatactctctccactacaatttcctcatcagaacatggggataataacggtacctacccataggagtagtgtaaggattatcccagataatgcatgtaaattgttagtccagggcctggtatacagtaagccttcactaacatcaactgctgtcatcatcatcatttgcccaaattcttgagtcatctcaggctgggcacagtggctcatgcctgtaatcccaggactttaggaggccaaggtggacggatcacctgaggtcaggagttcgagaccagcctggccaacatggtgaaaccccgtctctactaaaaatacaaaaaaaattagccaggtgtggtggcaggcacctgtaatcccagctacttgggaggctgagacaggagaattgcttgaacctgggaggcagaggttgcagtgagccaagatcgtgccactgcactccagcctgggtgacaaaagcgaaactccgtctcaaaaaaaaaaaaaaaaaagtcatctcttctctactgtcattcactctttaatccctggggggctggctgctgtcaatttactgaaactgctctcattaagataaccagtgatcacttctaatatgaggttatagaaaaaacaaatgaaaacacaaaatgaaaaaaagaaccagcaacttcctaaattcgttatcccacttaatctttcaggcctttggaactcttctttagaatttaacagacctagtcactcaccttcttgaaatggtccagtctttgctttgcatggcattgcctctccccatcctttctcttttctttcattaagtcttaattctccaccatcccttaaatgcttgtgtgtctgggtctccacccttagccatctttttatcactaggtgaacacttctaagacttcagcagccaaatctctatctttagcccagaccttccttctgagctcttgagccaaactgtccactaaatttattgtctaaggttttcacagtcatccaaaccaaatttatagagactattaactaaatcattattttctctcccttccccaattctttcccttccctagtaatcattttctttttttcctttttgagatggagtctcgctctgttgcccaggctggagtgcagtggtgtgatctcggctcactgcaacctccacctcctgggttcaagcgattctcctgcctcagcctcccaagtagctgggattacaggcgcatgccgctgcacctggctaatttttgtattttaagtagaggcgaggtttcactgtcttggccaggctggttacgaactcctgacctcaagtgatccatccaccttggcctcccaaagtgctgggattacaggcgtgagccaccgcaaccagcccctactaatcattttctcaagtttccagcttggactggaatgtcattgttatagtctagccaggagtccaagctggaaacatcagttgttatccttatatctccctcacccagcatgtccaactggctatcagggcctgacagtcccacctcaaagtctcatggcttccccgagtcctgctccatcctacatgaccccactgtatttcagagtgggctttagagtcacatgggcctgggttcaaatattaactatgccataaacctactaatgactgtttttggtcaagtgacttaacctctctgacctcagctttttgtgataattaaatgagatatcatatgtaaaatagctggcacacagtaagcactcaacaaacattccgctgcatccccttcctttgggtctccattgctaccgggtggaatgcaatatctacctacttggtctatcttgtcctttctcctcctaattgccctagagttaatttttctaaaataaataaataaataaatctggtactatcatcgctggctttaaaaccttcaacattttcttttttcctgtggaatgaagtctcaattccttaacataagtggtaagttccagctgcctttctggtccctgctccccaagcccatttactccaaaacattggctttttgccagccacttcatgtacatacgggcttaatctccacacatgaagagccctttgactaattcccttccccacaccaagttctgtccaattggcaagaacctcaaggcccacttcaaaaactatcatataaagggtgatacctattcttaagtggttcaatttttttcttttcttttttttttttttgagagagagagaggatactgttatgttgctcaggctggtcttgaactcctgggctcaagtgatccacccccatgtcagcctcccaaaatgctgggattacaagtgtgagcctctgcacctggcctggttcaattttttaaaactattttttacatatacgcaaacataggccaggcaccgtggctcacgcctgtaatcccagcactttggaaggccaaggcaagcgaatcacttgatgtcaggagttagagaccaacctgaaaaacatggtgaaaccccatctctactagaaatacaaacattaactgggcatggtggcagtcacctgtaatcccagctactcaggaggctgaggcaggagaattgcttgaacccgggaggcggaggttgtaggtgaggcgagatggtgccactgcactccagcttgagtgacaagacaagactctgtctcaagaaaaaaaataaaaataaaaaataaataaaaatataaaatatgtatatatatacacacacacatacataatatacatatatacacacacacaaaggaagagagagagaaaaagtgctaaaatgtggatgtggcaaaacatcaaaaactggtgaatctgggtaaaaatttcaaatgtacaaaaaacttgcaaaatgccatataattctggcaacatttctgtaaatttgaaaatatttcaaaagaaaaaagaaaggacgggcagggtggtttgtgcctgtaatcccagccctttaggaagcggaggcaggaggatcacttgagcccaggagctcaagattacagtgagttatgatcctgccacttcactccagcctgtacaacagggccaaacaactagcctatgttttaaaaatgtcaatgtcgtcaaaaaaagcaagggcagaaggaaggaaaggaggaagagggagaaggggagggggagaggaaggaaaagggagacaggaagaaagaaggggaagctgaagaaacgttcaagattagagaagacaaacatgagagctaaatgcgatgtgtgatcctggattggatgttaaattggcattaaaaaaaactgctataaaatacattacttggctgggcatggtggctcacgcctgtaatcccagcactttgggaggccgaggtgggtggatcacgatgtcaggagttcaagaccagcctggccaacatggtgaaactccatctctacttaaaatataaaaattagctaggcgtggtggcacgtgcctgtaatcccagctactcaggaggctgaggcaggagaatcgcttgaacccaggagacagaagttgcagtgagctgtgactgtggcactgcactccagcctgggggacagagcaagactccatctcagaaaaaaaaaaacaacattattggaacaagtggtgaaatttgcaaattgactctttattatataatagcattataacaatgctaaatgtttttaaaagttattctgtagttatgtaagagaatggccttgtgctttaaaaaattcatgctaaaatatttaagggcaaaggatcatgatatgtgcaactttaaaatgtttcagataaatagtctgtgttcgtatgtgtgtctagagagagaaaaaatatagcaaaatgttaacaattgataaatctgtattaagatttaccacttttacaacttttctgcacgtttgaaatgttttcaaaattaacttttttaaaaaatattttttctgaggcagggtctcactctgttgcccaggctgcagtgcagtgccaaaatcacagctcactgcagcctcaaattcctcggttcaagtgaccctcttaccccagcctcccgagtagctgggactacagccatgtaccaccatacccagcaacattttttattttctatagaaacaggtcttgctgtgttgcccaagctggtctccaactcctatcctcaagcaatcctcccacctcagcctcccaaagtactgggattacaagggtgagccatcatgcatcgtgcccactgaaaataaaaaaatatttttacagaaccacctcagatagaaataatgccttctgaaaaccaaaaagcactgatgatagatagtacaaccactgtgaagagttttgaggttcctcaaaaaactaaaaatagaactaccatatgatccaccaatcccactgctgggtatatactcaaaagaaagaaaatcagtatatcaaaaaggtagctgcactcccatgtttaactgaggcactattcacaatagccaagatttggaagcaacctaagtgttcaccagtagacaaacagataaggaaaatgtggtgcatatacacaagggaggactattccgccatataaaaatgagaccctgtcacctgcagcaacatggatagaaacagaggtgattatgttaaatgaaattagccaggcacaaaaagacaaacttcacggtctcacgtatttgtgggagctaagaattaaaacaactgaattcatggagtagagagtagaacaacaatggttacctgaggctagaaagggcagcggtgggggaaaggggggatggttaatgggcacaaaaatatagttagaaacaatgaataagatctagtatttgatagcacaacagggtgactatagacagcaataatttttttttttttgagacggagtctcacactgtggcccaggctggagtgcagtggggcaatctcagctcactgcaagctccgcctcctgggttctcgccattctcctgcctcagcctcctgagtagctgggactacaggcgcgtgccactacgcctaattttttgtatttttagtagagacagggtttcaccatgttagccaggatggtctcgatctcctgaccttgtgatccacctgcctcggcctcccaaagtgctgggattacaggtgtgagctacctcacccggccaacagcaataatttattgtacattttaaaataactaaaagagtataattggattgtttgaaacataaaggataaatgtttgaggtgacagatatccccccaaaaaatcaatgaaagaaattacagacacaaataaatggaaaaatatcctttgttcattgaatggaaaaattaatgttgttaaaatgatcatattactaaagtgatctacagattccatgcaatccctatccaaattccaatgacatttttcataaaaatagaaaaaataatcctaaagtccatatgaaaacacaaaagaccctgaatagccaaaacaatcttgaatgaaaagaacacatcacgacctgatttcaaaatatactgcaaagctacagcaatcaaaatagcatggtactgctatgaaaacagacacatagaccaatggaacagaatagagagcccagaaataaatccacacatttatagtcaattgctcttccacaaaagtactgagaacatacaacgggaaaaagagagtcttttcaataaatggcactgggaaaactggatatccacattcaaaagaatgaaattagacctttatctcacacaatatacaaaaatgaattcaaagtagattaaagacttaaacacaaaacctgaagctgtaaaactactagaagaaaacacaggagaaaagcttcttgacattggtttgggcaatgattttttggatatgaccctaaaacacaggcaacaaaagcaaaaatagacaaatgggattgcatcagactaaaaagctgccgcagcctgggtgcagtgactcgtgcctgtaatcccagcactttgggaggccaaggtgggggcatcacttgaggtcaggagtttaggaccagcctggccaacatggtgaaacctcatctctactagaaatacaaaaaattagccaggcatggtggcacacgcctgtagtcccagctacttgggaggctgaggcaggagaatcgcttgatcctgggaagcagtggttgcagtgagccgagatcgcacaattgcactccagcctgggcaacagagcaagactccatctcaaaaaaataaaataaaaataaaaagctgctgcacagcaaaggaaacaatcaacagtgaagagacaacctacagaatgggagaaaatatttgcaaaccatacatctgataaggggttaatagccgaaatatataagaactcaactcaacagcaaggaaactaataacccaatttaaaaatgagcaaaggacctgaacagatatttctcaaaaaatatgcaaaaatggccaacaagtatatacatatacaaaaaaatgctcaacttcgctaatcattaggaaaatgcaaattaaaaccacaatgaaatatcatctcacacctgttagaatagccattatcaaaaagaaaacaaatgttgatgtagacgtaaaaaaaagcaaaccttatatattgttgttgtttgagacggagtttcgctcttgttgcccagactggagtgcaatagtgcaatctcagctcaccgcaacctccacctcccgggttcaagcgattctcctgcctcagcctcccgagtagctggaactgggactacaggcatgtgccaccacgcctggctaattttgtatttttagtagagacagggtttctccatgttggtcaggctggtctcgaattcccaacctctggtaatccgcctgcctcagcctcctaaagtgctgggattacaggcgtgagctaccatgcccagcctatattgttgataagaatgggacatggcacaatcattatggaaaaacagtatggagactcctcaaaaaattaaaaatagaactaccatatgacccagcaatcgcacgtctgtagtatttacccaaaggaaatgaaatcagcatgttaaagatatatctgcactctcttgttcattgcagtgctatttacaatagccaaaatatgaaatcaacccgagtgtctatcaagggatgcatgaattttatttattttttgagacagagtctcgctctgtcatccaggctggagtgcagtgacacaatctcagctcactgcaacctctgcctccagggttcaaatgattctcatgtttcagctacctgaatagctgggattacagacacgtgccaccatgcccagctaatttttttgctatttttagtagagacagggtttcacaatgttggccaggctggtctggaactcctgacctcaggtgatctgcctgcctcagccgcccaaagtgctgggattacaggcgtgagccagtgtgtctgtctgggatgcatgaatttttaaaattggaatactattcagccttataaaaaagaaggaaaattggcaaggcgcagtggctcacgcctgtatcccagcactgtgggaggccgaggtgggcggatcacaaggtcaggagtttgagaccagcctggccaacatggtgaaaccgtctctactaaaaatacaaaaattagccaggcatggtggtgggtgcctgtaatcccagctactcaggaggctgaggcaggagaatcgcttgaacccaggcggcggaggttgcagtgagctgagatcgtgtcaccgcactccagcctgggcgacagagtgagactttgtctcaaaaagaaggaaatcttatcatttgtaacaacaaggatgaacctagagacattatgctaagtgaaataagccaggcacagaaagacaaatactgcattgatctcacttatatgtagaatctaaataagtcaaactcataaaagtagagaatagaatggtggttgtgaggactgggggtatggggagatgttagtcaaagggtaccaagttgcagttaggatcaattagttccggagatctgctgtacagcatggtgactataattaatgtatatttataaattgctaagagattgatcttaaatgttctcaccacacacacacacaaataagtatgtgaggtgatggatgtgttaattcatttgatttaatcattttacaatgtgtacataaaacatcatgtcataccctgtaaatatacacaacttttatttatcagttacacactaataaagctgggataaagaaaagaagaaataaatagtatgctgttttttttttttttttttttgagacagagtctgtgttgcccaggctggagtgcaatggtgtgatcttggctcactgcaacctccacctcccaggttcaagtgattctcctgcctcagcctcggagtagctgggattacaggcacctgccatcatgcccagctaatttttgtatttttgtagagatggggcttcaccatgttggccaggctggtcttgaactcctgacctcaggtgatctgcccgccttggcctcccaaagtgctgggattataggcataagccaccgagcccggctgaggaattccttcttttttaaggcaatagtatttgtcttacaccggaaaaaaaaaaagcacaaatattaaattctagcttgcttttcaaaaaataaaaaagaactaatgctgcttggtttaagctgctgtaaatgtttttacttttactataaaaagcctggattgagttgtaattattggtttaagcatttgtcttattctattagactgacagcttcttgatgcaagaacttaaattgccttttggaattgaatagtgagacaagtatcctaattcagggcagtattattttcctggcatggcattattagagtactaatatgctacaatttaggatcatagtaaacaaggctggacattctttttttttttttttttaagaggtagggtcgggtcttgctttgtcactcaagctggaatgcagtggcatgatcatagctcactgcagccttgaactcctgggctcaagcgatcctcctgcatagatgggactacatgagtgcctcacgacacctagctatgtttagttttttgtagaaacagggtctccctgtgttgcccaggctgctcttgaatgcctgccctcaatgaatcctcccaccttggcctcccaaagtgctggaattataagcatgagccaccagactggacattcttttttttgagacagcatcttgctctgtcaccaggctggagtgtagtggcacgatcttggttcactgtaacctctgcctcccaggttcaagcgattctcccgccttagcctcccgagtagctgggactacaggcacgcgccaccacactcagataatttttgtatttttagtagagacgggatttcaccatgttagccaggatggtctcgatctcttgacctcgtgatctgcccgcctcagcctcccaaagtgctgggataacaggcgtgaaccggcatgcctggcctagactggacattcttaaaacgggaacaagaatagaaaatgaccctgtggtttggagcatagaacagtgctggcattaatctactcaatgtactgttctgtgtctttacagaaccttctgcaggcaagactggaaagtccacccctggtcccaggcagatgcacaaagaagctggtataagggagaggcctcatgaaagttggagctgaatttgccattgatgcctaggattgcaacccctggtatttgttttatcacttccactacacacagtgcaggagggcagcccatccttagttggccagaggttttactttaaaacccatgggctaagacaccaaacagttggaacatataggggaaatcatgctcttcccttctccccatgcttgttttgatcaagaagctaggaaactttctcttctccacagtattgaagcgatggcatctgtcttagtccatttgtgttgctacaaaggctgggtaattaatttataaagaaaaaaaggtttatttggctcgtggttctgcaggctgcacaaaaagcatgccaccagcatctgcatctggtgagggtctcaggctgctttcactcatgggggaagttgaaggggagccagcgtgtgcagagatcacatggagagagaaaaagcaaagagagaggggagaggggtgccaggctctttttaacaccagttctctcagaaactaatagagtgagaactcacccactccttctaccattaatctattcctaaatgatccacccccattacccaagcatctctcattaggcttcacctccaacattgggaatcgaatttcaacatgagatttggaggggacagacatccaaactatctcagcatccatccttctctctgcgtactctgctgacttactcttccttgtagaagaaaacaattcagtgtgtgatcgatgagactaggtgcagggtcactgcacactcaccactcaggctgcctttgaattcctcttttgtagatgtctgcccacaggccacgtgccttcttctctcctccattcagcagcagatacagcagtttccggcgactatgcctatgaccaaggtcaagttcaattcatggagaaagaaatgagaagcctgttttggccttggatccaagccaccttctccaggccagcttcagtagcaatcaagctgacattttaaacccagtctgattcctgtgactgtaccatttggttcaggactcaaaagagagaagaagatgaaggacctctcagaatcccaacagtattttactaatctttggatcccagcacctctcctggtgcttgttctattacaagccctcaataaattttgttgtcttgaactcagagtgtgcagcacacaggcagatagctgctcacagctattattggggtggttgtgtttttttttcgtaacagaacagagtgatttttgatgcttttctagtttgtcagagggctctgaggctatacagaagcagctttagtgaacagaggagagcgagctgtgtctttgtgcttcacaatgattgcaatgccagagagtgatgtcccaggggagctgtcaaacagcttgacagcaattctagcaagaagtggtagaaacacaattttgcaataatgatcatacgttttttgaaattttcctttatccttgaaatgccttgtgttgtcgaaaatctattcattactgttcagtcatctgtagcgagtcatccctttaggtctctgtactcggaagttacagccctgggagtattttggcagagagacaaaggctcctaggcacagtgggggagtcagaaaggtacaagtaaatagcggctccaaggagttagatttttaaaaaaataataaaaggacgggaagtgacaagaaatcatcttcctcaaagcggctttagttttctaaaagcaggcaccatagctctttgatatttttaccatgcacatctctggtgctttcattttctttttcctctaatcccttccatgcatttccttcattaattatcccttttctctccaggatgttcaacttctccctgtctctactgcctccttcacctcgacctataaacatgtacaagtttcttacatcctcagaaacttccagctaccctcaaatgctcactctcttcccttctctttgtagccaagagacgagcctattccagtgctacccaaagcatggtctgcagaccagcagcaccagcatcccagggaagccagatttgaaatgcagttctcacgctcacccagacctactgaatccgaatctctgtgggtggggtccaagaatctgtttcaacacactctccaggtgatgcttaggcacacgggggtctgagaagcactgcctctacttcctgtctctggtcaccactttgggcgatcttcctctgtccctttaaggtgtgcaccttccccagggctctgtcctgggccttggcttcattgcactcaatcatttccctacgtgatctcatccaccaaaggttgatttggttatttgtgtgttttaacataggtttataccagtgattctcaaatttatgtctctatcccagacctctttctctgagccctaagaatgtccagttgctttctggacttgtttaccaaaatgttgcacagttctctaaactatgtctaaaaccaacttagtatctcctaaacccactctgcatcaatgtcaataatctgggttgtgtgacagctttgccacccccttggcgcctgccaccctgggatccagctacacccactgcctttatgcttcccagttcactgactgaagtgcacaccacaaggtctggcctatagacaagagcaatcacagagctcttcaaggatgccagggcacccctcatatatttatttctcacattcttgatgaaatgtatgccttctagaccctcccagggtgggtgagtaggcctcaaatgacaattgcactgtaactgccagtcccttaagtctttgaatcccttcctccacattaaaccaagacatgtccaccatctccagttcactcacgtggaccacctttgagtctatgtttcagccagccaaccaaccaatcagattcaacacttccttttttcttctttttttttttttttttttgagatggagtctcactctgtcacccaggctggagagcagtggcatgatcttggctcactgcaacctccgcctcccaggttcaagcgattctccagcctcagcctcccaagcagctgggattacaggcgtgcaccaccgcacccagctaatttttgtatttttagtagagatggggtttcaccatgttggtcaggctggtctcgaactcctgacctcaagtgatctgaccgccttggcctcccaaagtgctgggattacaggcatgagctgccgcgcccagccagattcaacattttctaacgcccaaagctgcaacgctaaatggagaatccctgcttagtgagcccatgtcaaaacattcagccccatccaactttatgttccttccacctactgggtgaagtgtcagagccccagcatcagaaagtggtcagctcatgggtagtagggtagtaagaagaatttactgacaacagtataggttagaaaaagacagttttattagatagaagagtgtagctgggcactactgcaagagaggaccgagcgtgctgcagtggacttttccttaggggtatttatgaatcttaaagagggagcttaacggtaattggactatactgaccacagaggtcatgatacatgattacatttgtagacattttggtgccttgatgtcagcaagtgttgcacgatgagtttcgacatgcatgcattctggagatgtatagaaattctagttatttatacattttggagaaagcagcccataccagatgcctgctttagatcatagggaatctcttatttctaaatccctcagctgaggagtttggcctctggatggactgtttggtgcctctcccaggtgatctttgctctcctcaccaccattatcccacactcatagtatccattcccatacacattccctgaatttctgtctgtagaaatttaaaaagtcaagtagttcagtggagtgcagcacacctcttatgggccagtcacacagtgtacctcatcttcaggggctgctggactgaagtctaacaaagaggagtggtggggtgggtcctgaggagttcaacattgtgttgctcagcacctgcctcaggggaggccattactatttcctcaggcaatgcaggcttcatcctctcagaggtggaaagaccaataccactgagggttgggaatgccactgttgctggggttgttgggaagcaaaggtgggagtgctccttcactgataaaggagacatcagaatttaggggctcaatgtcctcagctttatcaaagttttcccaaacatccccatcccaacttgcaagatcccattctttcccaattaatgctctcactttaactgcacatagcctgcaaagctgtgagttcaacttgcgttgtaattcagccacttgcaggatgaggttctgcatttgactttcagcaatttccgcccttctgtacagtaaataaaggtctccctcagggcacacataaaagttcctaggtcatttttgtggtgcatgaactaggaatgtgaatccctgacctcatcctttccttccaccagcatgacattagggttccaaccagcatcattatattcattcattttccaaaatgttcgaaagtatcatatataagccaggcatggtggctcacacctgtaatcccagcattttgggaggccaaagtgggaggatcacttgagcccaggagtttgagaacagcctgggccacatggcaagacccttgtctctaaaaaaaaaaagctgggcaaagtggcacatacctgtagtcccagctactcaggaagctgatgtgggaggatcacttgagcctaagcagtcaaggctgcagtgagccatgattgtgctactgcactccagctggggtgacagagtaagactctacctcagaaaacaaacaaacaaacaaacaaaaggtatcatatataacattactgagctcattgattctatagttggttgattaggagtatccaacacagtattctgtgtatctctacaaacagctcacgttatggactattagcactctttttactactggaaatacagtcattagtgcctttaaatctaatcagattagagagccaattctagaaaccccagaaccagttcagaaaattcatccttaaaattctgctcctctagaagcactctcagtgccaaaatctatacaaagttttccagagaaacagaacaagaaggagatatctctatatatagatagacatagagatatctccagatatctccttctggtcctgtatatagatagatacagagagctagtctcatccacaaacactctcaaagacacaatgaaaaagagagagggattgattaattgtaaggaattgactcacacgattatggatagtaagtcccatgaccagcctttctgtaagccagagacccaggaaagctcatggtataattaagtctgcatccaaagtcctgagaaccagggaaccaacggtgtgtaaatcccagtctggagatgttccagctcaagcaggcaggcaggaaaccaaaacagggcaaactccttcttcctctgccttttgttctcttcaggccctccatcgatcagatgatgcctgctcacattagggaaggcaatctactttacagaatccaatgtcaatcttagccagaaacacccgcaaagacacatcaggaaataatgtttattctgggtatcccatggctagtcaagttgacagataaaattaaccatttcatgggcatatgactaaactgagcaaccacacagtgatgaaaatgcctgctaaaaggaagagtgtcatctatacagttttgaagttctctagaattctgcttactctattagtccattttcaggttgctgataaagacatacccaagactgggtaatttataaagaaagaggtttaatggactcacagttccatgtggctgaggaggcctcacaatcgtggtggaaggctaaaggcacatcttacatggccacaggcaagagcaaatgagagtttgtgcagggaaactcccctttataaaaccatcagatctctctatctcaagaactgcacagggaagacccaccccccgattcaattacctcccaccgggtccctcccatgacacgtgagaattgtggaagccacaattcaagatgagatttggatggggacacagccaaaccatatcggttacctttctaggttttaggtcaatttcaagatgcatacatcaccaccaagcaactacacagcaaatatactcagtccgtgattctgaaacatgggcatgcatcagagtcacctgggtggcttgttacaatgcagatttctagggtccacccctagagtttctgatttagtcggttttggatgggacctgagatttcctagtgctaacaaatccccaggtgatattgatgctgatcaaaggaatacactttgagaaccagtaaattcaagagtacaattgctacacctgacaatcttcacagccaagagaagctaatctgatctcccttaataaaaccatattattttttttctttctccccccgcccccccaccccgagaaggagtctcgctcggttgcccagactggagtgcagtggcacgatctcggctcactgcaagctccgcctcctggtttcatgccattctcctgcctcagcctcccgagtagctgggactataggtgcccaccaccatgcccggctaatttttttgtatttttagtagagacagggtttcaccatgttagccaggatggtctcgatctcctgacctcacgtgatccacccaccttggcctcccaaactgctgggattacaggcgtgcaccaaacgctcctggccagaaaaccatattctaaggaaagcaaacagttatcacaattacacacttcagcaacctccatctcctctttgctacttaagggatgaaaacatcaactgtgtatgtaaaagttaaatgttgggaaagcggaggaacataagtttttgttttgtttgtagagacagggttctcattatgttacccagccttgtctcaaactcctgggctcaagcactttacctgccttagcctcccaaatgagttctaacactttaaattctgttcatctctgaaaaaatcactgcaaggctgaattcaccgtacgataaagaaatcatgcccacaatgttatttttctagggttcccttttcctcacaaagtggtgccagtggaaagcagcatttcagtaactcctacctttatcctagtttagtgactgatgcattaacatggggtgagtttgattaaagggggcagccaacatttacaggtacaattaaaataggagctatgggctgggcatggaggctcatgcctgtaatcccagcactttgggaggcgaaagcaggtgaccacctgaggtcaggagttcaagaccagcctggccaacatggtgaaaccccatctctactaaaaacacaaaaattagccaggcatggtggcacacacctgtaatctcacctactccagaggttgaagcacaagaatcgcttgaactcaggaggcagaggttgccgaaatcttgagaggttgcggaggagagagtgagcagagatcgtgacactgcactccagcctaggcaacagagagagagtcggtctcaaaaaaaaaaaaaaaaaaaacaaaaaacaaaacataaaaataaaattaggccaggcacagtggctcatgcctgtaatcccagcactttgggaggccaaggtgggcatatcacctgaggtcaggagttcaagactagcctagccaacatggtgaaactccgtctctactaaaaatacaaaaaattagctgggcgtggtagcacacacctgtaatcccaactactggcgaggcagaggcaggagaatcgcttcaacccgggaggcggaggctgcagtgagccaagattgtgccactgcactccagcctaggtgacagagcaagactccgtctcaaaaaataaattaattaaaaaaaaaaaacagaagctatggtgctatcaggaaagggagtaaagatttgctctcattctattctctcctttatgtttcagacagttgaagggactacccaaataccaaaatgatattgaggaggaggcactttgtgatggctaattttatgtgtcagcttgattgggtcaggagtgtccaaacattgggtcagacgttattcaggtgtctggggatgacattaacattggaatcgagagactgagtaaagcctgctgtgcttgggcctcatccaaacagttgaagacctgactagaacaaaatggctgagtatgaaagaactcctgcctcactgttgagcatcacagttgacatcagctgtttcctgcctttagacttgaactgagacatcgcttcttccttctgacttgaactgagacatcacctcttccttcagacttgcacggacacatcagctcttcttgagtctcaagcctgctggttttcgaactagaatttacatcaccagcccttctgggtctccagccatccaactgcaaatcctgggacttgtcagccttcataattgtgtgagtcaattctatactaaatctttatacactcacatactctgttggatctgtttctctggcaatcccttaatacagaactggaccaaaaattccttctaaatcactgtttgctgccttaatttctacctcactaaaaattagcactattcctagcaacctgtctcaaagtcccccatctccccccaacctttttttttttttttttttttgagacagagtctcactctgctgcctaagctggagtgcagtggtgcaatctcagctcactgcaatctctgcctccctggctcaagcgatccttctgcctcagctccccaagtagctgggaccacaggcacacaacatcatgcccagctagtttttgtatttttggtcgagacggggttttgccatgttgcccaggttgctctcaaactcctgggctcaggtgatccacctgtatcagcctcccaaagtgctcagatcacaggcataagccactgcacccggcctcaaagtccctttaaaggacatctgcaacctggcatctcagtacaggtgattcagattcaatgactcagtggtgatttcagccctgttgtgccatcagccctgggagtgaagccaaggttgaggcttgctgaaagtggaacgcatgttcatttagacacccattgtaatattctgggtgatgctaatttttcttgcttaatatcagagaacagagaagttagagatgatatcaaaaatggaaacaacatgtacagtccccataatttgtgaattatggggacagattccatttctgtcttttgtcttgagcttctatgtgagctactacaaaaatgacagggctttctgccctccatttcccccttagtttgcacaacacacacaccccttctcaaacttctgaaagctctcagacatacttttgaaagtaaagaggctatagaggacatatcaatttatctaatagagtaatagcattatgcaggaaatggtaacttgaagagaagcatttgataggcatgaaagagcagcaaagctgcatagcattaacaccccactccactttaagtactgatgtaggtaactgctgcaataattatgccattaagaaagagtgttccaatggccttgatacatgctaccatcggaataaagttaggacattttccttatagttagtgcagtgcgaattgaagaagaccaagaaatgcttttcagagtaagagaggtaccataaagggcctcagagatttgcttctatcaggccaggcacagtgacttatgcctgtaatcccagtattttgggaggccaaggcaggtggatcacttaaggtcaagagtttgagaccagcctggccaacatggtgaaaccctgcctctactaaaaatacaaaaattagctgggcatggtggcacacacctgtagtcccagctactcaggaggctgaggcaggagaattgcttgaacccaggagacggaggttgcagtgagctgagatcatgccaatgcactccagcctgggcaacacagtaagactctgtctcaaaaaaaaaaaaaaaagagattctatcaaaggaggcaggggtatgctattggttactggtgcatattagatgcttgccagatgccaagcctaggtaaacttgtacactagccatgatatgagaagtatgttggggctgatgctggcttcaggagatctacatggtgtgagtctggatcaataaaatgtgaaaattaatggtagcttccatttagtgaataataacatcaatagttaacaactctgggctaggcacagtggctcacgcctgtaatctcagcattttgggaagccgaggcaggcagatcaactgaggtcacaagttcgagaccatcctggccaacatggggaaaccccgtctctactaaaaatacaaaaattagccaggcatggtggtgggcactgtggctgtaatcccagctactggtgaggctgaggcaggagaattgcttgaacctgggacgcggaggttgcagtgagccgagattgcaccactgcactccagcctgggtgacagagtgagactctgtctcaaaaaaaaaaaaaaaaaaaaaaaaagtaacaactctggaaagaaagtattctttgtcttttcttttttcttttcttttttttttttttttgagacaggacctcatattttgttggagtgcactggtgcaatcatacctcactgcagccttgaactcctgggctcgagcaatcctctcacgtcagcctcacaagtagctgccactacaagtgcatgccaccatgcccgaataattttttcagttttattttgtaaagacaatgtctcagcatcttgcccaggctggtcttgaactcctggactcaagagattctcccacctcaatcccccaaagtgctaggattacaggcgtgagtcactgagcttgcccaggctgcttttgaactcctagactaaagagattctgctgcctcaattccccaaagtgttgggatgacaggtgtgagccaccacgcccagccaagggaagaaaatattcttttttttttttttatactttaatttctagggtacatgtgcacaatgtgcaggtttgttacatatgtatacatgtgccatgttggtgtgctgcacccattaactcgtcatttacattaggtatatctcctaatgctgtccctcccccctccccccacaccaagggaagaaaatattcttaagtgacctgcccaaagtcatacagctaataagtggcagagacaagatctgaacctaagtgcttctgattccaaagcctgggcttaaacacaatttgattctgcttgccaaagcattacagctgagtaagctttaaggaaacctcaccaatcggaaccatgcaaaataaagaaatatcagaggcctgagctatcaagtccagtgaggagggtagccacttggccaagaggcccagtattgaacagaaatattcacagtaccttgaatgaaggaggggccaacagtgactcctggtccttgaccaaacttgagtcaggctcctctgaatgctcttcttgaccaggcctcatccttggcctgctgaatctggttctgcaagaatcccccacccttgttactttaccaagttccttgcattacttttccatccactggcccctgcaccttgtccattgtctacaaatccccagctgccactgttatattcagggttgagtcttgacccccaatgcaatagtcttgaaaaaagttttctttgcctacttaacttgttcagcgcaatttttctctgacaggtaaacaatgagggagctccattagcacaaccagagtctttcatccttgccgccccagaggatctggtgtctgggtcaacagactgaccagcacaggaagctcccacaccttcaagttgagtctgccagaggactctccaggttgcattgctgtggggacctttatgcaaggtaaggagacaaaccagggagtcgaaggcaggaggagaggactggaatacaattttaagaaaggagtggctggggctgggcgtggtggctcatgcctgtaatcccagcgctctgagaggccgaggcaggcagatcacctgaggtcaggagttcgagaccagcctggccaacatggtgaaaccccatctctactaataatacaaaattagctgggtgtggtggcatgtgcctgtaatcccagctactggggaggctgaggcacaagaatcacttgaacccaggaggcgggggttgtagtgagccaagatcacgccactgcactccagcctgggcgacagagtgaaactctgtctcaaataaaaaaaaagaaagaaaagaaaagagtggctgggcgtaagcacgcctatagtcccagcactttgggaggccaaggtgggaggattgcttaagtccaggagtttgagaccagcctgggcaacatagtgagactccatcaaaaaaaattagccaggcttggtggtacacgcccatggtcccagctattcaggaggctgaggcaggaggatcacttgagcccagttgtttgagaatgtaggaagccatgatcatgccactgcagtccagcctgggtgacagagtgagacattgtctaaaaacaaaaagaaagaaggaaggaaggaaaagaaaagaaaagaaaagagacagcaagaaagcaagaaagaaccttccggagtttaaactgatgcactgagtacctaagatctctctcatctcccattcaaggacccattgaaatgatgaaaaaggcattttgaaaaagagtgaaataataagaggcgcaaaaagaaaggctgccatcagcaggcaagaaatcttaaaaactcctggagggcagaaagcattaggatgagattgacaaagaagcagacaagaaaaccacagattcaaacgccaccaggaaggccagatcttgaaaagaagtccatggaagcttctaactggatgacgccagacagaaggcacagaagtgcaccatggcaatcattaggataattcattaaagctgggagagttgggactgccagtgtcttaaacacattcagcttttgccctccagctaaacatagaaaacctatccagaaaagaataaaaaagcgtacttggtaattaaggtatgattacagggcataagaaaaaaaatcagatggcaggactgccttccttagaatgtacacaagtaggacaggcacagtggctcatgcctgtaatcccagcactttgggaggttgagatggacggattgcccgagcccaggagtttgagccatgggcaacatggtgagaccgcatctctacaagaaatacaaaaattagcttggtgtggtgccatgtgcctgtagtcccaactacttgggaggctgaggtgggaggatcacttgagcccaggagattgaggctgtagtgagccatgaccacactccagccagggtgacagagcaagaccctgtctcaaaaaaaaaaaaaaaaaaaaagtaaacaagtgacgactgagcttgagatatgaaagtaaaggtggccagacgtggtggctcacgcctataaccccaggactttgggacgcctaggtgggtggatcacctgaggtcaggagtttgagaccagcctggctaacatggcaaaaccccgtctctactaaaaatacaaaaatgagtcaggcatggtggtggcaggcaactgtaatctcagctactcgggaggctgaggcatgagaatcactctaacctgggaggtggagcctgcagtgaactgatgtcacaccatcgcaccccagtctgggcgatagagtgagataccctctcaaaaaaaaaaaaaaaaaaaaaaaaaaaagtaaaggaaaactttcagaataaaaaggaaacagacaaaaataggtaaatgtgagagaaaaggctcaagggtgatagagtcaggtagtccaatattcctttcataggaattccaaaggagacaaagaaggaaggggaggaaatcatcaaagatatgagagaaaaagaccctgagctgaagaggaactcatcttcagattacaatgtccactgactgctgtacagagtgaattaaaaaagacctaatggtgttgcattcttgtgaaatttcagaacgctgggcaattttgaaagcttccggggggagatgtatataaaaaggaaaggaaagggaattaaactgccatcaaatttcatcaacaatactggttgctggaagacaatggaacaatatcttcaaatgcctggggaaaggaatatcttgaactctggattctataaagaatcatccgacacagttcaagaatcaatatgaaaaaaaatattgagacctgtcaaaactcacattgtttaccaccactcattccacgtgaaaaaagtactttaggtgtttgcttactcaaaatgaaaaaagaccccagaggccggatgcagtggctcacgtctgtgagccatgatcacgtcacttcactccagcctgggtgacacagcaagaccctgtctcaaacaaacaaacaaacaaacaaacaaagatggaaagaaagattctgtctctgcccatgcactcaccaagggaaggccacatgggcacacaatgacaggcagccacctgcaagccagggagagggtccctaccagaatgtgaccatgctggcaccctgatcccagacttccatcctccagaatggtgagaaaataaatgccggctgttgaagccacccagcctgctgtggtattttgttagggcagcccaagcagaccatgacagcccgccaaatccgggtctttctctctgctcattctgtaacccactgcctgtcaactgtgtcttcaccaatagtcattccgtcactggtgaagaaggtgtcacctggtcagggcccacgtgtattttcaaaagataaagagacagcaatgttttctcacttattttcttcctcttttcccaggagtctattcacttcgtaacgcctgtctaactgagcagccaaatttagcctgccgccagcaatggcagcctcctcagccctgccccagagaggaaaactgagagacaccagcctctgcctgaaactgtcttgctgaggggaggtttgagaacgctgtcttgtaaagtggaagagattaggggtttcaaagaatagtggtcttcaggccaggcacagtggctcacacctgtaattccagcactttgggaggctgaggtgggcggatcacttgaggtcaggagttcgagaccagcctggccaacatggtgaaacctcgtctctactaaaaatttaaaatttagctgggtgtggtggtgtgcacctgtaattctagctactcaggaggctgagacaggagaattgcttgaacccaggaggtggaggttgcggtgagccaagatcacgccactgtactctagcgtggcgacacagcgagacaccatcacaaataaaaataaaagaataatggtcttcaaatggaggtataagaacacttcctcttcagtacaagggcaccaacagtttgaaaggaattgatttccaggcccgcttttctgcaactgatctgcctgagcccttgcctgcgagggaggggcagggtcttactttccccagtagcccttttctactttataaaaagaagaggacaccccttacccatcctaatcttaccatggcatgtttcctggggcaccaaacccaatcctggtattagtgctgaaccaacatataaccacaaggactgagtaaaatttgcttttgcaaagtcaggggctttccaacatttttcctttccctcaagcctaaggagatctcattgaattgcatgtggatagagcattaaaaattatttttgacgataaatcagcatagggtttttggctcagaatgagctcaaagaattaactgatagtacggtaatacaattatttccatttctatctactttttaattttttggagacagggtttcactctgtcttccaggctagagtgcagtggcacaatcgtggttcactgcagcctcaaacaactgggcaatggtgcaatcgcagctcagctcactgcagcctggacctcctgggttcaaggagctcccacctcagcctccccagtagctgggaccacaggcacgtgccaccacgcctggctaatttttgtattttttagagacaggatttcaccatgttgcccaggctggtctcgaacccctggactctaattatccacccgccttggcctcccaaagtgctgggattacagacgtgaaccaccaagcctggctctactttttatacaaacaggtttcctctgcagtgtcatggagaaacagaattgattctagcagtgagtaggaaccaaacctagacacataaactaactggagaaaaaggccaactgtcccattaaggaagatatttctaacttaaatctaactccctatttaataggacttattcattggaaatacatattgttgttttggccaatttgtattactactactgatgacaacttcatcagaagaaatgattaaacgcttgttcaatggtcacaggaaataaaaatatcaatataggtctatactttttgtgcagtatgatagggtgaccagcaaaagactttcaaggataaaaatatatgtgaggaaaagctgtgtgggaagtggaatggaaattcaaatttagaaaaaaaaatgatataacatttcttatgtttcaaggagagcttgtccaggtattattttaatggatgatggcaggaatcaaacacgatgagattcctttgtataccatcaaaaaaaataataatgtaacaggtttctgtgcatgcgtaggttacactcatatatacacatacatctatacacatatttaaggacctattatttaccctctatagtttatataagtatatattttatattgtattatatatttatacttttcatatttaatattgtttatgtaatatgtgaaacaatatgtaatatatacatttatattttatcttttattttaattttttttttgagaaggagtttcactctgttgcccaggctggagtgcagtggcgcaaccttggctcactgcaacctctgcctcccgggttcaagcaattttcctgccttagcctcctgagtagctgggagtacaggtgcctgccaccacaaccagctaattttttttttgtatttttagtagaggcggggtttcaccatgttggccaggctggtctggaactcctgacctcaaatgatccacccacctcggcctcccaaagtgctgggattacaggcatgagccacctcacctggcctacatatataatttatataacatacagccttaatatcaatacatatgtatactatatatatatgtgtgtttatatacgccccaacatatatatattcatgttaaggctttatatttaggtatgtgtatttagatattttttattatgtatacatatacttatctattcatatgcatatatgcatttgtatttatgctaaagctttatataatacatatattgtgtgtatatgtgtgtgtgtatatatatatataaaacataaagctcatatacataaagcctcaacatgaatatgctctgattgtgatgagattatacagctgtatacaatgaccaaaattatcaaattatacacttcaaattggtagactttattgtatgtaaacaatagaaacaaacaatcacacctgtaatcccagcactttgggaggctgaggcgggcggatcacgaagtcaggagatcgagaccatcctggctaacacgatgaaaccccgtctctactaaaaatacaaaaaattagcctggcgtggtggcaggcacctgtagtcccagcgacttgggaggctgaggcagaagaatagcgtgaacccgggaggcggagcttgcagtgagcagagatcgcgccactgcactccagcctgggcaacagagcaagactctgtctcaaaaaaaaaaaaaaaaaagaaacgaacaaaagagaggaaaactttccccattaaaatagcaatagcaaaaaaaaaaaaaaaaaaaaaaaaaaagccaaaaatcggaatagagggctatttccttagcatgggataagtaagtaatattgtacgtgcctatgtgaggcacacagaatagtgagaatcaaaggcagagagtggagtgggagttgccgggggatggggaatggagagttagtatttagtgggtacagagtttcagttttacaagatgaaaagagttctagagaaggatagtggtgatggttgcacaagattatgaatgtatttaataccactgaactgtacacttaaaagtgattaagatgataaattgtgttatgtatattttaacacaataaaaattgggagtgtgtgtatgtgtatatatatatgtctgtgtgtacacacacacatatatataattgggagtgtgtgtgtatatacagtatgtgtatgtttgtatgagagcttaacgtacatacacttgtgtacatgtctacctaacaacttttttttttttttggagacaaggtctcactgctctgtcgcccgggctggagtgccgcagtgcaatcacagctcactgcagcctcaacctccctagctcaagcaatcctcccacctcagccttgtaagtagctggtactacaggtgtacaccactacactgggctaattttttaaattttctgtagtgatgaggtcttggtatgttacccaggctggtctcaaactcctggcctcaaccgatcttcctgccttggcctcccaaagcactgggattacaggcatgagccgctgtacccggcccaactttattttttaaactaagttgagtgtcaatattgacaatattctgtaaaacatatccttacaactatttaaacgtatagtaaaatgttgcatgtagattgtcaacatgcgagggggcatgcaattttacaaagttctttcaggggatattcaagccaaagagtgtgaaaacccctggacccccaggcagaattagacacaggggagactccagtacagtggcaactgagacaacaaagaaacactgaggacattttcactaccaggatataggcaaacgaaactgcaatgatgtcatgtttgcatatgtggcagatacaaaaagcttaaaagcagctctttgttctcttgctgagtttggggcaggcactggcacaaattgaggaaagtaagtgacaggaccggcagcaattagacttgctgatgttggggcgaccctggggttgcatctgggaaaccgacacccggatccaggatagaagctgacatagaagtaagcaaaactgctgtaggccccggtcaagggctctcctctcaggattcctcccataactacctgaaacaaggatttggaataccttgactttggagagagaaatcgaaatcagttcaactgaactctaatcaggcgtgagaatcctcttgtcattcaagtttaattggcttaatctcccaaatgatactgaaggcagtagtagttcttatgctcctagggtgcagtattatattatttataaatgcagacacttcaaaagcaataaaacacttggcccttgctctcaataaacttgccctctaactgggaggacagcatccaaatggaaaaaaaaaaaaatgaagaacagttcaaagcaacatataagaagtatgtaataatcccccaagagaaacaaagactgcattgcatactttcccagtagaagtacaaattggcacagcaccccatggagggaagtgggccacagagatcagaattacaaatgagtatctcctttgacctggtaatttaacttctgggaatttatccttcagccgtacttaggaaataacatatactctaagttactcactgtagcattgttcaaaataacaaaagattggaaagaaggcaaatatccttgagtagaagactgatgaaatacattgtgctacatacatacaatggaatatttcgaaggtataaaagtgcatgaggagggccgggtgcagtggctcatgcctataatcccagcactttgggaggctgaggtgggtggatcacttgaggttgggagttcaagacaagcctgaaaaacacaacacaaccccatctctactaaaaatacaaaaattagccaggcatggtggtgggcacctgtaatcccagctactcaggaggctgaggcagaagaatcacttgaacccaggaggcagaggttgcagtgagctgagattgtgccactgcactccagcctgggcgacagagcgagctcaaaaaaagagtgcatgaggaaactttcaaggtacagatatttttaaagtctccaagataagtgcgggggcagggggggaacagcaaggtacagaaaaggtgtataagacacttccttttgtttacaaggaagggaaaaaaagaatatagaatatatttttatgtgctttagtattcacaaataaagtctagatgaatacacacagaaatgaaaagctgattacctggagtggattagggagggtgaaaacagggtggatggggctgagcaggagggagacttctgctccatgaaccatgtgactgtgttcctactcaaaacaattaagagaataatgaaaaaatatcccctgctgaggcctgacataataagcaggaagttggtttctgagggacccccccacccaccgtccggtgtcaagcatatgccctcagctttggctggctctgaacagcagggaaaatgtgagagcaggaccacgtggcttctgcacgggcagccctgtgtccaggcccctgcccagctgctgagcttcctgcccggtgcccctgcatcagccagagtccaaccccaccctctcagcctgccctcttgccagcgggctcagaatcagctgtcctcaccagttaccagaatcctcaagcagctggctttaattgtgtctatgggaaggcagaaagaggaagggaaggtcgattaagtaaacctctattaagggaggagtgaagcccaggaggtcaaagagcccaggatagaagcaaggctagctgccaagccaagcttggaactctcccaaaagataccacagagaaatatgcccaaatgtgaatgctactggcttcaagttgtgtaataatgggtaggttttttccccccgggtctttatgctttgatgtgctttccaattttttttttaaataagcacagatgactcttacaaagcaaaaaaatagagtgtacaatgtgaaagatgtatacattaaaaataaaaaccaaaccatgattgttaccaaaccatgtagtccagaaaccttgaaggataaaaaaggaagctcagatggacagcataagaatgttacagctctaaacaaaattaaaatattacaataaaaaaaatgttcccataatgctgaagatgtcattggacagcaggtcagtggggcccacttagtcgggccaggcagagtggagctgtccaaggtgccagagtaagaaagggcagtggatgcagagatgactgcgttactcagtgcactggcaaggccaatagctcctccccagtcttcctcccactgagtttaaaactctctatccagcaattcaaaccactttcttccttatacttgctaaagtccataatgagactgggcacagtggctcatgtctataatttcagcactttgggaggccgaggcaggtggatcacctgaggtcaggagttcaagagcagcctggccaacatggcgaaacctccactttaccaaaaaatacaaaaaaaaattagctgggtgtggtggtggtggtgggcgcctgtagttccacctacttgggaggctgaggtggaagaatcacttgaacccagaggcagaggctgcagtgagccaagatcatgccactgcactccagccttggcaacagagtgagaccctgtctcaaaataaacaaaaaaaaagtaagagagagagagagtgtgaagaaagaaagaaagaaagaaagaaagaaagaaagaccaaccataataatggtcacattcatctcagaaacaacaaataattttttagtcttcatcaattttttttctcagctctttaggggttatgaaaggagtaagcaaatatttaaactatttgaggaggttttaggcatatttgaagctagcaaagtttcccaccatttaacacaaggctttacatgaagtcagtaaaattagatgcaaaatcaagcccctgaatacttgaaaaaatacagtagaccttgacgtgtgcaaggtatttatcccaaaacctttcctaatcccaaggttgggaacagccctatagcaaaaaacttccccctttattagtcaggactcttttgattataaattatagaaactcaaatgacacagaggggaatgaattggaggataaaatttaaaaaatagttgaacaggttgggcgcagtggctcatgcctataatcccagcactttgggaagctgagtcaggcagattacttgaggtcaggagtttaaaaccagcctgggcaacaatggtgaaatcctaaaaatacaaaaattagccgggtgtggtggctcacctgtaatcccagctactcaagaggctgaggcaggagaatcacttgaacctcccaggaggcagaggctgcagcgagccaagatcatgccactgcaccccagactggatgacgggagagaaatcttatctcaaaaaaaaaaaatggttgaacaaccttctgattgctcacagataataaattataaattataaatgaccagggtctagcatgccacagagaaaataagttttaatggcagttgcttccctgaaatggatttattgtctaaaaggcagaaggttctcaatgatcctgcatctggactcatcttgacaccacctgctctttctcacccacccatcatcaactaactcctattatttctaagccaataataggtctccaattagtcccttcctctctctcaactactgtccttgttcaggccgccatcatgaccaggttgaatcattctgtaaatagcagattgagaaatgtgatgcctgggcttgttagctaaatacctattaagaaagaatgatttaggccaggtgcagtagctcatgctacaatcctagtactttgggaggccgaggctggtggatcgcttgagcccaagagttcaagacaagcctaggaaacatagcaaaaccttgtcctctactaaaagtacaaaaaactagccaggtgtggtggcacacacctgtggtcccagctactccagaggctgaggtgggaagatcgcctaagcccagggaggtcaaagatgcagtgagctatgatcgtgccactgcactccagcctgtgcaacaggtgtgagacgctgtctcaaaaaaaaaaaaaaaaaaaaggaagatttttattctcaaggtatattaaagaagactaggaaaatcacaagagcatgggtttcagaatcagatcgttccggcttaaatgtagctctatcacttactctatggatgaccatggcaaagtattcaatctgagttgactttcttataaaataggcataataatatttgtcttgcagaattttttttctttcttctttttcttagacagagtgcctcactctgtcacctaggctggtcttgaattcctggactcaagtgatcctcccaccttggcctcccaaagtgctaggattacaggtgtgagccagcagggctggctttgtgaacttattatgaagattaaatcaggtggaagatttttaaagtgctcaaaatattgagagaatattcaatatatgctgctaatatcagaggcctcatgctaaccttacaaaagtcaataaacaaacacaaggtaaatgatgagggtcagaaaaatacatcggccttactcttctcaccttgctttgcctcccaaacaaaggtctgccaccattttatttctctaagcccaaaaggtttgactaaataatagttctctgtttgccttgttaggcagtgtttgatgtggcaccattacctgaagaatgaagtcaagagtcattcttggaagagggttagaatgtttgaatgttcaggtttgaatgtttgcagaattacaacaaaattggggtatgaaaaagaagatggggctccagaaagtcaaacatctaaagtgtttgttctatattattatatgatatagactgcaatgtggatataataatagaagatggtattagagatgatattacaatattgaacatggattcaacaataatatcttcctgaaagattttttttaaagctagactccccagcctgggcaacatagtaagaccccatctttacaaaatataaaaagttggctagaagtgatggtgagtagtcctagctactcaggtggccaaggtaggagaattgcttgagcccaagaggttgaggccgcagtgagctatgatgatgccactgtactccagcctgggcaacaaagcaagatcctgtctttaaaaaagcaaaacaaaaacaaacaaacaaacaaaaagaataaaaccattcagcacagagtaaactcaatgaaatcaacaaaatctcctaagaatctgaaagccatacaagtttctttttcaccttgtttaataattctcaaaaaccatgactggggaaaccaattctggtattaaaaataaatactgctttctccctttttagctaaactttataagactcagcatctcagaaagaccctcttatattctagagatatgctactgtcttcctagagagcatcagcaaacaactaacttaaaatgtaatcagtgaaaaaatataaaacatttccaaaagaaattttaacaagacccaaataaattgaaagacatcccatgttcatggattggaagacttaatattgttaggatgagaatactatccaaagctttatacagatccaatgcaatccctatcaaaatctcaagagcatcttttgcagaaatgaaaaatcccattctaaaattcataaagaattaagagactcaaaatagccaaaaataatcttgaaaaagaaaaacaaagttggagggctcacatgttctgatttcaaaacgtattacaaagctacagtaatcaaaaaagtgtaatcaaaacagcactaagtgtggtgctggcataaaaatagacatatcaaccaatggaataaaatttagaacccagaaataaacccaaatgtctctagtcaattgatttcagcaagagtgtcaaggccactcaatgggaaaaagagagtgttttcaacaaatggtgctgaaaaaactggatatccacatgcgaaatgaagttagacccttaccctataccatatataaaaactaacagtgaatcaaaagcctaaatttaagaggcagaactataaaactcttaaaagaaaacatggggcaaatctgcatggtcttagattaggcagtggtttcttaagtatgacacttaaaaagcacaggtaacaaaagaatatatagataaactaaactttttgaaaataaaaaacttgtatgcatcaatggacactatcaagagagtaaaaacacaatccacagaatgggagaaaatatgtataaatcatatatcctataagggtttgatgtccagaatacgtaaaaaactcctacaactgaacaacacaaaaacaatcccattttaaaatgtgcaaagggagggattagcaggaaggaagaaatgaataggatgagcacagaggatttttagggcagtaaaactattctatatgctactatcatgtggattcatgtcattatacactcatcaaaacttgcataccaacaccaagagtgacctctaacgtaaatatgcattctgggtgctaatgatatgtcaatttggttaatcaattgtattagatgtaccactctgatgagggatgttgaatgtgggtcagcctatgcatgtgtggaggtgagaggtatatgggaattctctactttctgctcagttttgctgttaacttaaaaactactctaaaaaataatacagtggggagaaaaagaggacaaagagcttgaacagacatttctccaaagaagatatacaaatgaccaataaacacaggaaaagatgctcaacattgctaatcattaaggaaatgcaaatgaaaaccataatgagatagcatttcacacctaagatggctatatatatatatatatggctatatataaatatatctatatattttttttgagacaggatctcactttgtcgtctgggctacagtgcagtggcacgatcatggcttactgcagcctccacctcctggggtcaagtgatcctcccacctcagcctcttgagtagctgagtccataggcatgcaccaccacagccagataatttttttttttgtagctatggggcctccctgtgttgcgcaggctggcctggaactcctgggctcaagcaatcctcccaccttggcctccaaaaatgctgggtttacaggcatgagccacaacaccaggctataatttttttttaaaggaaaatagcaaatgtggaagaggatgtggaaaaatgggaacccttggacattgctggtgggaatgtagcgacgcaaccactgtggaaaacagcttggcagttcctcaagaagttaaacatagaattaccatatgatccagcaacttcactcctatgaaaacacccagaagaagtaaaaaggactcaggcaaatacttgcataccaatgttcattgaggtattattcaccagagccaaaagctagaaacaactgaaatgcccaacatgggaagaaacaaaacgtggttcagtatacatacacacacacacacacacacacagacacacacacacacacacacaatggaatattattcagccgtcaaaattaagctctgatgcatgctacaatatggatggaccttgaagacatgctaaatgaaagaggctagacacaaaaggaccatactgtatgattccacatataggaagagacgcaaattcgtagatacagaagtctaatggtagttgccagaagctgggaggagaaaggaattgggagttattaaccttggttaatgggaagagagttttgtcagagtagtgatgcttgcacagattatgaatgtaatgaatgccactgagttatacacaaaagtggcttaagtgggaaattttatgttatatgtatttcaacacattttttaagagaaaagtaatatgtgcaaaatgacctatgaatacaggaattagagactgttgctggtcaggcatggtggctcatgcttataatcccagcactttggaaggctgaggcaggaggatcacttgagcccaggagtttgagattagcctgggcaacataaggagagcatgtctctacaaaaaataaaaaattagccgggtgtggtggcatatgcctgtagtactagttattctggaacctgaggcgggaagatttcctgagcctaggagttcgaggctgcagtgagtcatgatagtgccactgcactccagcgttggggacaaagttagaccctgtctttgaaaaaaacagaagaaactgttctga

SEQ ID NO: 2741 - DNA, 1172 bp, Homo sapiens; identical to SEQ ID NO: 1232

SEQ ID NO: 2742 - DNA, 2167 bp, Homo sapiens
acaaggaaagaaaacctatagtggtctatgtctgtcgatgatatctattcagctaacacatgagcattctgccaggcagcacagaaccctaacctacagagagctgcagagaaacaccacggagaggtggaggaggaggatgaagcacttcttaaacagaggtcgactaaccagcaaattcttctttcttcctttttttttcttaaagggatctatattctagcttctaaaaacttgagtctgaacagaaataaaaagaaagagtcgatgctaacatacaaaacactcagcatctctctttatcattttttaaaaggcatgcaattttgacaaatgatacatttctaaaagctttcttctctattcaagatattaatgtccattctgaatgaaagatgcctacatactgcctgcaatcagtttctagcaacagacaccctatgaagcccctagcagggaaggtggggggaagggagggaaactaatagggctgcagttcacaaatcaaaacaagagggccgtcagcaagatttattgatagcagccttgggaatgaaactgggttctccaaagtcgtctgtgacaatctggcaacctctgaaactctttgcttattcgcagttgacatcacttgttagaagagcaactctgaaagaaaacgagcaaattccaaaatatgaaaagattcacaatttcaaggtgcatacattcagagggccacactggtgtgaatactgtgccaactttatgtggggtctcattgctcagggagtgaaatgtgcagattgtggtttgaatgttcataagcagtgttccaagatggtcccaaatgactgtaagccagacttgaagcatgtcaaaaaggtgtacagctgtgaccttacgacgctcgtgaaagcacataccactaagcggccaatggtggtagacatgtgcatcagggagattgagtctagaggtcttaattctgaaggactataccgagtatcaggatttagtgacctaattgaagatgtcaagatggctttcgacagagatggtgagaaggcagatatttctgtgaacatgtatgaagatatcaacattatcactggtgcacttaaactgtacttcagggatttgccaattccactcattacatatgatgcctaccctaagtttatagaatctgccaaaattatggatccggatgagcaattggaaacccttcatgaagcactgaaactactgccacctgctcactgcgaaaccctccggtacctcatggcacatctaaagagagtgaccctccacgaaaaggagaatcttatgaatgcagagaaccttggaatcgtctttggacccacccttatgagatctccagaactagacgccatggctgcattgaatgatatacggtatcagagactggtggtggagctgcttatcaaaaacgaagacattttattttaaatttttaatttgaggggaaaagaaatgttttacagatgaaggaatgttttatagtaatttaatttgctcctgtagctgcattatttcttgattagaggtttgggcatataaccagattaaagtgaaggaactttctgttgtttttgtagcaccgctcagctgtcttgtaaaacagtgaacacacgctttctggttctagtaatcctgggtgtttatcacgttcagagaaactcaagctattgcatgattagccccctatctggcaaggaaaccccatacagaagaaacaacaaacctgcgcctgcaccgcctctgcgtcctgggtagtctgtgcttgtaatccagcatgtttcacagagtaagcctgttgtgactttgcttttggggtctatgtcattggtttctgatgcttgtacaaacacgcacacacaaatggataaaacagcacctctggctgttacattaccataaaccatatcacatgcctacattttacaaatgatttctggtttctcttagttcttctctaacatagtactttctttccagcaaaagcaaaatgtgttttcagatttgttactttaataaaggttatccataccaataaaaagtgtacaacacagcattttctgttaaattattattggttttcagttgtaatttggtattttttctggcatgcgtttattaatttattaaattggcttttagaaat

SEQ ID NO: 2743 - DNA, 987 bp, Homo sapiens
catgtaaaaatgtgctcctcttaatgtaagcattttctcattttatgaaaaaattccccctgtgtcagtttaatgttttctcaattgtcagttttatgggttatcacaatgttttgattattcctttctggaataactgtgagttatggagcacacttaaggactttccaaatgttggctgtttctaacttggcgctgagcgcctttggccgcctttccgatgatgccctcgggacgcgttggcaggaggaatccctgggcgcaaggcgcggctgggccagccccttacaaagccctacgagctgcggggacccaggccggggcagcgggggccacgccccatctccgaccccacggggaccgggccgggactgcgccagcgggggcctcgccccgtctctgaccccagaggaaccggcagcgggcagcacgcgtgggcctctccccgcgggacgccggacgcgcagccagacgcgctccccaggccccctccgagagcgaggacgcgcccaggcccgctctgccggagccgccactggggggcgtagcgcggacgcgcacccttgcctcgggcgcctgcgcgggaggccgcgtcacgtgacccaccgcggccccgccccgcgacgagctcccgccggtcacgtgacccgcctctgcgcgcccccgggcacgaccccggagtctccgcgggcggccagggcgcgcgtgcgcggaggtgagccgggccggggctgcggggcttccctgagcgcgggccgggtcggtggggcggtcggctgcccgcgccggcctctcagttgggaaagctgaggttgtcgccggggccgcgggtggaggtcggggatgaggcagcaggtaggacagtgacctcggtgacgcgaaggaccccggccacctctaggttctcctcgtccgcccgttgttcagcgagggaggctctgggcctgccgcagctgacggggaaactgaggcacggagcgggtagag

SEQ ID NO: 2744 - DNA, 5434 bp, Homo sapiens; identical to SEQ ID NO: 1239

SEQ ID NO: 2745 - DNA, 2440 bp, Homo sapiens
cttgagcgcctcttccggttaccttttcccagcgccagaggcgcctagggttggggtcctcgctcaggcacagagacccgacaccgagcggcggcttccccgggatcgagggacgcgcacgccagaggagacgaaaggaacccgggtcggaccagatcggaaccactgaccattgcccatggcggccctaggccctagcagccagaatgtcactgaatacgtcgttcgagttcctaagaatacaaccaaaaaatataacatcatggcttttaatgcagccgacaaagtcaactttgctacgtggaatcaggctcggctggagcgggacttgagcaacaagaaaatctaccaagaggaggagatgcccgaatcgggcgcgggcagtgagttcaaccgcaagcttcgggaggaggctcggaggaagaagtacggcatcgtcctcaaggagttccggcccgaggaccagccctggctgctccgggtcaacggcaaatcaggcaggaagttcaagggcatcaagaagggaggcgtaacagagaacacgtcctactacatcttcacccagtgccccgacggggccttcgaggccttccccgtgcacaactggtacaatttcacaccgctggcccggcatcgcacgctcactgccgaggaggccgaggaggagtgggagaggaggaacaaggtgctgaaccacttcagcatcatgcagcagcggcggctcaaggatcaggaccaggacgaggatgaggaggagaaggagaaacgtggccgcaggaaggcgagcgagctgcgcatccacgacctggaggacgacctggagatgtcgtccgatgccagtgatgccagtggtgaggaggggggcagagtccccaaggccaagaagaaggcgccgctggccaagggcggcaggaaaaagaagaagaagaagggttcagacgacgaggccttcgaggacagcgatgatggggacttcgagggccaagaggtggactacatgtcagacggctccagtagctcccaagaagagcctgagagcaaggccaaggcgccgcagcaggaggaggggcccaagggtgtcgatgagcagagcgacagtagtgaggagagtgaggaggagaagccgcctgaggaggacaaggaggaggaggaggagaagaaggcacccaccccgcaggagaagaagcgcaggaaagacagcagcgaggagtcggacagctcagaggagagcgacattgacagcgaggcctcctcagccttcttcatggcgaagaagaagacgccacccaagagagagcggaagccgtcgggagggagctcaaggggcaacagccgcccaggcacgcccagcgcagagggtggcagcacctcctccaccctgcgggcggctgccagcaaactcgagcaagggaagcgggtgagcgagatgcctgcagccaagcggttgcggctggacacgggaccccagagcctgtctgggaagtcgacaccccagccaccatcaggcaagacaacacccaacagcggcgacgtgcaggtgactgaggatgccgtgcgccgctacctgacacggaagcccatgaccactaaggacctgctgaaaaagttccagaccaagaagacagggctgagcagcgagcagacagtgaacgtgttggcccagatcctcaagcgactcaaccccgagcgcaagatgatcaacgacaaaatgcacttctccctcaaggagtgaggcttggtccaatacatggctctgccccccagaacttaaggctctcactgccccttcgccatcctagagtgaggctctgtccaatacatggctctgccctccagaacttcaggctctcagtgacccttcgacatcctgcttgctccctgactcccagggccccgtagttagcaattctggaaaagttaagccatctcctcctctggcccttccttctggaatcttcagatgcctgttaggccttcttattgtcctcctcctcctggctcggcctccctcacactgaccaagggcctgtgctgcccactgggtaacttctacagttctcccttccacttccctaagtctctcttcagctgtgacttatccaccacatagcccagtaagtcttcagttttggctgggcatgatggtgagcgcctgcagtcccagctacttgggaggctaagcccagttcaaggctgcagtgaactatgatggtgccactgcattccagcctgggtgacagaatgaaatcctggcacaaaaaaaaaaaagtagccaggcatggtggcgggagcctgttgtcccagctgttccgtaggctgaggcacgagattcacttgaacctgggaggtggaggttgctgtgagctgacaccacgccactgcactccagcctgggtgacagtgagactctgtctcaataaataaaaaataataataaatt

SEQ ID NO: 2746 - DNA, 4780 bp, Homo sapiens
gccccgagtagtgagtggccccgcgcagggtctggagagtcaccgcggcggcgccgggtggtggttaaaccatgttaaggaggattttacagaggactcctgggagagttggctctcaaggttctgatttagattcatcagcaactcctataaacacagtggacgtcaataatgaaagctcttcagagggtttcatatgtccccagtgtatgaaatctcttggatctgctgatgaacttttcaaacattatgaagctgttcatgatgctggtaatgactcaggtcatggaggagagtctaatcttgctttgaagcgagatgatgtaacactgctcagacaagaggtccaagacctacaggcttcacttaaggaagaaaaatggtactcggaagaattaaagaaggaattagaaaaatatcaagggctgcagcagcaagaggccaaacctgatgggttggtgactgattcatcagcagaactacagtctttggaacagcaattagaagaagcccaaacagaaaattttaatattaagcaaatgaaagacttatttgaacagaaagcagcccaacttgctactgaaattgcagatataaagtcaaagtatgatgaagaaaggagtcttcgagaagctgctgaacaaaaagtgacacgtctgacagaagaattaaacaaagaggcaactgtaattcaagatctgaagacggaactgcttcagagacctggtatagaagatgttgccgtgctaaagaaagaactggtccaagttcaaacactaatggataacatgaccttggaacgtgagcgagaatctgaaaaactcaaagatgaatgcaaaaaattgcagtcacaatatgctagctcagaggccacaataagccagctaaggagtgaacttgccaaaggcccccaggaagttgctgtatatgtacaggaactacaaaaactgaaaagttcagttaatgaattaacacaaaaaaatcagaccttgacagaaaacttgctgaaaaaagaacaagactatactaagttagaggagaaacataatgaagaatctgtgagtaaaaagaatattcaggcaacccttcatcaaaaagacctagattgtcaacagcttcagtcaagattgtctgcatctgaaacctcactgcatagaatacatgtagaactaagtgaaaaaggagaagctactcaaaagctcaaagaagaattatctgaggtagagaccaagtaccagcatctaaaggcggagtttaagcagctacaacaacagagagaagaaaaggagcagcatgggttacaactccaaagtgaaattaatcaattacatagcaaacttctggagacagagcgccaactaggggaagctcatggtaggctgaaggaacagagacagctttcaagtgaaaagttgatggataaagaacaacaagtggctgatttacaactcaaactttctcggttagaagagcagttgaaggaaaaagttacaaattctacagaattgcagcatcaattagataaaacaaagcaacagcatcaagaacaacaggctcttcagcaaagcaccacggcaaaacttcgagaagctcagaatgatttggaacaagttctacgtcaaattggcgataaggaccaaaagatccagaaccttgaagctttattacagaagagtaaagaaaatatttcattactagaaaaagaaagagaagatctttatgcaaaaattcaggctggtgaaggagagactgctgttcttaaccagttacaagaaaaaaaccatacactacaggagcaagtaactcaactaacagagaagctgaagaatcagtcagaaagtcataaacaagcccaggagaatttgcatgaccaggtacaagagcagaaggcacatcttagagctgcacaagaccgtgtcctttccctagaaactagtgtcaatgaattaaatagtcaattaaatgaaagcaaggagaaggtctcccagcttgacatacagattaaagccaaaaccgaactattactatcagcagaagcagcaaaaactgctcaaagagctgatcttcagaatcatttggacacagctcaaaatgcattacaagataaacagcaggagttaaataagattactactcagttggatcaggtcactgcaaagttacaagacaagcaagaacattgcagtcagctggaaagtcatcttaaagaatataaagagaaatacctctctttagaacagaaaaccgaagagctagaaggtcaaattaagaaactagaagctgatagtcttgaagttaaagcaagcaaggagcaggctttgcaagatctacaacagcaaagacagctgaacacagatttagagctcagagccacagaattgagtaaacaacttgaaatggagaaggaaatagtatccagtacaagattggatctacagaaaaaatctgaagcccttgaaagtatcaagcaaaagcttaccaagcaagaggaagaaaaacaaatcctgaaacaagattttgaaactttaagtcaagaaacaaagattcagcatgaggaattgaataacagaattcaaacaacagtaacagaactacaaaaagtgaaaatggagaaagaagctttaatgacagagctttctacagtaaaggacaaactatcaaaagtttctgattctttgaaaaactctaaaagtgaatttgaaaaggagaatcagaaaggaaaagccgctatattagacttggaaaaaacttgcaaagaattaaagcatcaacttcaagtgcagatggaaaacacacttaaggaacagaaggaactgaaaaagtcacttgaaaaagagaaggaggcttctcatcagttgaaattggaactcaattcaatgcaggaacaacttatacaggcccagaatactttaaaacaaaatgaaaaagaagagcaacaacttcaggggaacataaatgagctaaagcaatcaagtgaacagaagaaaaaacaaattgaagcactccaaggagagcttaaaattgctgttttacagaagacagagcttgagaataaactacagcagcagttaacacaggcagcccaggaacttgcagcagagaaagagaaaatatcagtattacaaaacaactatgaaaaaagtcaggaaactttcaaacagcttcaatctgatttctatgggagggaatctgaacttctagccaccaggcaagatcttaagtctgtagaagagaagctttctctagcacaggaggacttgatttcaaacagaaatcaaattggaaatcaaaataaattgattcaagaactgaagactgccaaggctacattggagcaggattcagcaaagaaagaacagcaattgcaggagcgatgtaaagcactacaagacattcagaaagaaaagtcactgaaagaaaaagaactggtaaatgagaagtctaaattggcagagatagaagaaattaaatgtagacaagaaaaagaaatcactaaactaaacgaagaactcaagtcccacaaactagaaagcataaaggagataacaaatcttaaagatgctaaacagcttctaattcagcagaaattagaacttcaaggaaaagcggactccctgaaggcagctgttgaacaggagaagagaaatcagcagatactaaaagaccaggtgaaaaaggaagaagaggagctgaagaaagaatttattgagaaagaagctaagttgcattccgaaataaaagaaaaggaagtaggaatgaagaagcatgaagaaaatgaggctaaacttaccatgcagattacagcattaaatgaaaacttaggcactgtgaagaaggagtggcaatctagtcaacggagagttagtgagcttgagaaacaaacggatgacttacggggtgaaattgcagtattagaagcaacggttcagaataatcaagatgaaaggagagcactactggaaagatgtcttaaaggagaaggtgaaatagaaaagcttcaaaccaaagtattagaattgcaaagaaagctggataatacaactgcagcagtgcaggagctgggcagagaaaaccaatcacttcagatcaaacatacacaagcgttgaatagaaagtgggccgaagacaatgaagtacaaaactgtatggcctgtgggaaaggcttttcagtaacagtgagacggcatcactgccgacagtgtggaaatatcttctgtgctgaatgttcagccaaaaatgccttaactccttcctccaagaagcctgttcgtgtctgtgatgcatgtttcaatgacttgcaaggataatgggttatcacaacttcagagtaatattacactaacattagatttttaataaatgtacttaatagaggtcttggactactatttggtttggacactggttgcaatactagaccaaataggaattagtatattttggaatgttatggatatcaagtaaaactcttctatttttgtgagacttgggcttatcatctttcattacttttttcccatttagcccctggaatagctttcatgccaagtttagaattagccaatgaaatgtaaataaactttggacagaaaatagcaatgtatttttttaatataatttcattattcacaaatgaagaatgcaattccatagcttacttctttctcctaaatttaatgtacaaaaatgtacatggatgatattatcacttgttgctgtttttgttgcacaatagcacattaattatattaaatattctctttgtgaagttaaaaaaaaa

SEQ ID NO: 2747 - DNA, 6417 bp, Homo sapiens
gcggctccgggtgactcgggccagtgtagaggtcctcaggccgccggcaggagcagctgggccaattccctggccgggagcggaaggggatggcgtcgggcctgggctccccgtccccctgctcggcgggcagtgaggaggaggatatggatgcacttttgaacaacagcctgcccccaccccacccagaaaatgaagaggacccagaagaggatttgtcagaaacagagactccaaagctcaagaagaagaaaaagcctaagaaacctcgggaccctaaaatccctaagagcaagcgccaaaaaaaggagcgtatgctcttatgccggcagctgggggacagctctggggaggggccagagtttgtggaggaggaggaagaggtggctctgcgctcagacagtgagggcagcgactatactcctggcaagaagaagaagaagaagcttggacctaagaaagagaagaagagcaaatccaagcggaaggaggaggaggaggaggatgatgatgatgatgattcaaaggagcctaaatcatctgctcagctcctggaagactggggcatggaagacattgaccacgtgttctcagaggaggattatcgaaccctcaccaactacaaggccttcagccagtttgtcagacccctcattgctgccaaaaatcccaagattgctgtctccaagatgatgatggttttgggtgcaaaatggcgggagttcagtaccaataaccccttcaaaggcagttctggggcatcagtggcagctgcggcagcagcagcggtagctgtggtggagagcatggtgacagccactgaggttgcaccaccacctccccctgtggaggtgcctatccgcaaggccaagaccaaggagggcaaaggtcccaatgctcggaggaagcccaagggcagccctcgtgtacctgatgccaagaagcctaaacccaagaaagtagctcccctgaaaatcaagctgggaggttttggttccaagcgtaagagatcctcgagtgaggatgatgacttagatgtggaatctgacttcgatgatgccagtatcaatagctattctgtttctgatggttccaccagccgtagtagccgcagccgcaagaaactccgaaccactaaaaagaaaaagaaaggcgaggaggaggtgactgctgtggatggttatgagacagaccaccaggactattgcgaggtgtgccagcaaggcggtgagatcatcctgtgtgatacctgtccccgtgcttaccacatggtctgcctggatcccgacatggagaaggctcccgagggcaagtggagctgcccacactgcgagaaggaaggcatccagtgggaagctaaagaggacaattcggagggtgaggagatcctggaagaggttgggggagacctcgaagaggaggatgaccaccatatggaattctgtcgggtctgcaaggatggtggggaactgctctgctgtgatacctgtccttcttcctaccacatccactgcctgaatcccccacttccagagatccccaacggtgaatggctctgtccccgttgtacgtgtccagctctgaagggcaaagtgcagaagatcctaatctggaagtggggtcagccaccatctcccacaccagtgcctcggcctccagatgctgatcccaacacgccctccccaaagcccttggaggggcggccagagcggcagttctttgtgaaatggcaaggcatgtcttactggcactgctcctgggtttctgaactgcagctggagctgcactgtcaggtgatgttccgaaactatcagcggaagaatgatatggatgagccaccttctggggactttggtggtgatgaagagaaaagccgaaagcgaaagaacaaggaccctaaatttgcagagatggaggaacgcttctatcgctatgggataaaacccgagtggatgatgatccaccgaatcctcaaccacagtgtggacaagaagggccacgtccactacttgatcaagtggcgggacttaccttacgatcaggcttcttgggagagtgaggatgtggagatccaggattacgacctgttcaagcagagctattggaatcacagggagttaatgaggggtgaggaaggccgaccaggcaagaagctcaagaaggtgaagcttcggaagttggagaggcctccagaaacgccaacagttgatccaacagtgaagtatgagcgacagccagagtacctggatgctacaggtggaaccctgcacccctatcaaatggagggcctgaattggttgcgcttctcctgggctcagggcactgacaccatcttggctgatgagatgggccttgggaaaactgtacagacagcagtcttcctgtattccctttacaaggagggtcattccaaaggccccttcctagtgagcgcccctctttctaccatcatcaactgggagcgggagtttgaaatgtgggctccagacatgtatgtcgtaacctatgtgggtgacaaggacagccgtgccatcatccgagagaatgagttctcctttgaagacaatgccattcgtggtggcaagaaggcctcccgcatgaagaaagaggcatctgtgaaattccatgtgctgctgacatcctatgaattgatcaccattgacatggctattttgggctctattgattgggcctgcctcatcgtggatgaagcccatcggctgaagaacaatcagtctaagttcttccgggtattgaatggttactcactccagcacaagctgttgctgactgggacaccattacaaaacaatctggaagagttgtttcatctgctcaactttctcacccccgagaggttccacaatttggaaggttttttggaggagtttgctgacattgccaaggaggaccagataaaaaaactgcatgacatgctggggccgcacatgttgcggcggctcaaagccgatgtgttcaagaacatgccctccaagacagaactaattgtgcgtgtggagctgagccctatgcagaagaaatactacaagtacatcctcactcgaaattttgaagcactcaatgcccgaggtggtggcaaccaggtgtctctgctgaatgtggtgatggatcttaagaagtgctgcaaccatccatacctcttccctgtggctgcaatggaagctcctaagatgcctaatggcatgtatgatggcagtgccctaatcagagcatctgggaaattattgctgctgcagaaaatgctcaagaaccttaaggagggtgggcatcgtgtactcatcttttcccagatgaccaagatgctagacctgctagaggatttcttggaacatgaaggttataaatacgaacgcatcgatggtggaatcactgggaacatgcggcaagaggccattgaccgcttcaatgcaccgggtgctcagcagttctgcttcttgctttccactcgagctgggggccttggaatcaatctggccactgctgacacagttattatctatgactctgactggaacccccataatgacattcaggcctttagcagagctcaccggattgggcaaaataaaaaggtaatgatctaccggtttgtgacccgtgcgtcagtggaggagcgcatcacgcaggtggcaaagaagaaaatgatgctgacgcatctagtggtgcggcctgggctgggctccaagactggatctatgtccaaacaggagcttgatgatatcctcaaatttggcactgaggaactattcaaggatgaagccactgatggaggaggagacaacaaagagggagaagatagcagtgttatccactacgatgataaggccattgaacggctgctagaccgtaaccaggatgagactgaagacacagaattgcagggcatgaatgaatatttgagctcattcaaagtggcccagtatgtggtacgggaagaagaaatgggggaggaagaggaggtagaacgggaaatcattaaacaggaagaaagtgtggatcctgactactgggagaaattgctgcggcaccattatgagcagcagcaagaagatctagcccgaaatctgggcaaaggaaaaagaatccgtaaacaggtcaactacaatgatggctcccaggaggaccgagattggcaggacgaccagtccgacaaccagtccgattactcagtggcttcagaggaaggtgatgaagactttgatgaacgttcagaagctccccgtaggcccagtcgtaagggcctgcggaatgataaagataagccattgcctcctctgttggcccgtgttggtgggaatattgaagtacttggttttaatgctcgtcagcgaaaagcctttcttaatgcaattatgcgatatggtatgccacctcaggatgcttttactacccagtggcttgtaagagacctgcgaggcaaatcagagaaagagttcaaggcatatgtctctcttttcatgcggcatttatgtgagccgggggcagatggggctgagacctttgctgatggtgtcccccgagaaggcctgtctcgccagcatgtccttactagaattggtgttatgtctttgattcgcaagaaggttcaggagtttgaacatgttaatgggcgctggagcatgcctgaactggctgaggtggaggaaaacaagaagatgtcccagccagggtcaccctccccaaaaactcctacaccctccactccaggggacacgcagcccaacactcctgcacctgtcccacctgctgaagatgggataaaaatagaggaaaatagcctcaaagaagaagagagcatagaaggagaaaaggaggttaaatctacagcccctgagactgccattgagtgtacacaggcccctgcccctgcctcagaggatgaaaaggtcgttgttgaaccccctgagggagaggagaaagtggaaaaggcagaggtgaaggagagaacagaggaacctatggagacagagcccaaaggtgctgctgatgtagagaaggtggaggaaaagtcagcaatagatctgacccctattgtggtagaagacaaagaagagaagaaagaagaagaagagaaaaaagaggtgatgcttcagaatggagagacccccaaggacctgaatgatgagaaacagaagaaaaatattaaacaacgtttcatgtttaacattgcagatggtggttttactgagttgcactccctttggcagaatgaagagcgggcagccacagttaccaagaagacttatgagatctggcatcgacggcatgactactggctgctagccggcattataaaccatggctatgcccggtggcaagacatccagaatgacccacgctatgccatcctcaatgagcctttcaagggtgaaatgaaccgtggcaatttcttagagatcaagaataaatttctagctcgaaggtttaagctcttagaacaagctctggtgattgaggaacagctgcgccgggctgcttacttgaacatgtcagaagacccttctcacccttccatggccctcaacacccgctttgctgaggtggagtgtttggcggaaagtcatcagcacctgtccaaggagtcaatggcaggaaacaagccagccaatgcagtcctgcacaaagttctgaaacagctggaagaactgctgagtgacatgaaagctgatgtgactcgactcccagctaccattgcccgaattcccccagttgctgtgaggttacagatgtcagagcgtaacattctcagccgcctggcaaaccgggcacccgaacctaccccacagcaggtagcccagcagcagtgaagatgcagactgataccacctccaccgctgagcagtgaccttcctcactttctcttgtcccagcttctcccctgggggcctgagagaccctcaccttccttctgcccatcttccatgttgtaaaggaacagccccagtgcactgggggaggggagggagtgaggggcagtggtgcccttcctgcagaagagacatgcagcagtagcgctggcgccatctgcaggagctggcgggctggccttctggaccctggcttctccccactgtaacgcctgttacacacaaactgttgtgggttcctgccaggcttgaagaaaatgatctgaattttttcctccttttggttttattttgttggtttattttgtgttttcttttctcctttttggggggtattcagagtgggctgggcccctgggcgagacacagctacctctgttggcatctttttaataccaggaacccagcggctctagccactgagcggctaaatgaaataaagtggaaaaaaaaaaaaaaggaaaaaaccaaaagcataaaaaaccacagcaaatttcttgatgaaaattgaaaataaaagtttccttgt

SEQ ID NO: 2748 - DNA, 1559 bp, Homo sapiens
cgcagggcaggatgtacacgctgctgtcgggcttgtacaagtacatgtttcagaaggacgagtactgcatcctgatcctgggcctggacaatgctgggaagacgaccttcctggagcagtcgaaaacccgatttaacaagaactacaaggggatgagtctatccaaaatcaccaccaccgtgggcctaaacatcggcactgtggatgtgggaaaggctcggctcatgttctgggacttaggagggcaggaagagctgcagtctttgtgggacaagtattatgcggagtgtcacggcgtcatctacgtcattgactccaccgacgaggagaggctggctgagtccaagcaggcgtttgagaaggtggtgaccagcgaggcgctgtgcggtgtccccgtcttggtgctggccaacaagcaggatgtggagacgtgcctctcaatccctgacatcaagacggccttcagcgactgcaccagcaagatcggcaggcgcgattgcctgacccaggcctgctcggccctcacaggcaaaggggtgcgcgagggcatcgagtggatggtgaagtgtgtcgtgcggaatgtgcaccggccgccgcggcagagggacatcacgtagcggcagccgcgctgccgtcgggacggctggtcccctggtgctggaggagtggcctcctgttggctcccatgctgctgatctggggggtgggtttgctttgctttggggttcttctatttactttgttttctcgaagacaaactttcctctatgtctggaaaagcgtaggcatccggaggctttggaggggagtctggcagcccggctggcccaggccctgcagcggcagcctttccacagggcgcagcggcggcctttcgaggccctttctggggggtctgagggagacctggttgggaattggggctccagtgctcaggctggcttgggctgcatgaggacagccctgtgggaccctcgggagaccccgtggctgtctccgccccatcgaggaggaggcccgtcagccatggctgccatctggcttctgccctgtgaccccgtgaccccggaagtggtctggggctgatcttgccttgaggaagacccaggccatgttcccaaaggccagcgggggccctggattgtgatgcagcctcgggacagggctgaggcctgcgggggaagacctataccccacgcctgggcctggcttcacctcaccctaatcccccgggagggagctgactgatgcaaaaagctgagggggcctgctgggagtggctgtttttatgccccagccccgcaagttggggagtgtttgtgggggtccagagccctcccccagccaggagagaacctcccggaggggttctctgtggggccctgtgtcccctgctcgggagtaaggctggtcctggggtcctccctgcacggaccccactgggcctgccgagtgctgtgttcttcctcagtctggctgtgggcaggagcggcctgcccagtgtcacccagggtgagtgcaaaataaagacggcgagtgtgaaaaaaaaaaaaaaaaaa

SEQ ID NO: 2749 - DNA, 1883 bp, Homo sapiens
ccgggccggggtgccagcgcccgccttcccgtttcctcccgttccgcagcgcgcccacggcctgtgaccccggcgaccgctccccagtgacgagagagcggggccgggcgctgctccggcctgacctgcgaagggacctcggtccagtcccctgttgcgccgcgcccccgtccgtccgtgcgcgggccagtcaggggccagtgtctcgagcggtcgaggtcgcagacctagaggcgccccacaggccggcccggggcgctgggagcgccggccgcgggccgggtggggatgcctctgcacgtgaagtggccgttccccgcggtgccgccgctcacctggaccctggccagcagcgtcgtcatgggcttggtgggcacctacagctgcttctggaccaagtacatgaaccacctgaccgtgcacaacagggaggtgctgtacgagctcatcgagaagcgaggcccggccacgcccctcatcaccgtgtccaatcaccagtcctgcatggacgaccctcatctctgggggatcctgaaactccgccacatctggaacctgaagttgatgcgttggacccctgcagctgcagacatctgcttcaccaaggagctacactcccacttcttcagcttgggcaagtgtgtgcctgtgtgccgaggagcagaatttttccaagcagagaatgaggggaaaggtgttctagacacaggcaggcacatgccaggtgctggaaaaagaagagagaaaggagatggcgtctaccagaaggggatggacttcattttggagaagctcaaccatggggactgggtgcatatcttcccagaagggaaagtgaacatgagttccgaattcctgcgtttcaagtggggaatcgggcgcctgattgctgagtgtcatctcaaccccatcatcctgcccctgtggcatgtcggaatgaatgacgtccttcctaacagtccgccctacttcccccgctttggacagaaaatcactgtgctgatcgggaagcccttcagtgccctgcctgtactcgagcggctccgggcggagaacaagtcggctgtggagatgcggaaagccctgacggacttcattcaagaggaattccagcatctgaagactcaggcagagcagctccacaaccacctccagcctgggagataggccttgcttgctgccttctggattcttggcccgcacagagctggggctgagggatggactgatgcttttagctcaaacgtggcttttagacagatttgttcatagaccctctcaagtgccctctccgagctggtaggcattccagctcctccgtgcttcctcagttacacaaaggacctcagctgcttctcccacttggccaagcagggaggaagaagcttaggcagggctctctttccttcttgccttcagatgttctctcccaggggctggcttcaggagggagcatagaaggcaggtgagcaaccagttggctaggggagcagggggcccaccagagctgtggagaggggaccctaagactcctcggcctggctcctacccaccgcccttgccgaaccaggagctgctcactacctcctcagggatggccgttggccacgtcttccttctgcctgagcttcccccccaccacaggccctttcctcaggcaaggtctggcctcaggtgggccgcaggcgggaaaagcagcccttggccagaagtcaagcccagccacgtggagcctagagtgagggcctgaggtctggctgcttgcccccatgctggcgccaacaacttctccatcctttctgcctctcaacatcacttgaatcctagggcctgggttttcatgtttttgaaacagaaccataaagcatatgtgttggcttgtt

SEQ ID NO: 2750 - DNA, 2532 bp, Homo sapiens
cggcgccgctcgctcccccgacccggactcccccatgtatgacgactcctacgtgcccgggtttgaggactcggaggcgggttcagccgactcctacaccagccgcccatctctggactcagacgtctccctggaggaggaccgggagagtgcccggcgtgaagtagagagccaggctcagcagcagctcgaaagggccaagcacaaacctgtggcatttgcggtgaggaccaatgtcagctactgtggcgtactggatgaggagtgcccagtccagggctctggagtcaactttgaggccaaagattttctgcacattaaagagaagtacagcaatgactggtggatcgggcggctagtgaaagagggcggggacatcgccttcatccccagcccccagcgcctggagagcatccggctcaaacaggagcagaaggccaggagatctgggaacccttccagcctgagtgacattggcaaccgacgctcccctccgccatctctagccaagcagaagcaaaagcaggcggaacatgttcccccatatgacgtggtgccctccatgcggcctgtggtgctggtgggaccctctctgaaaggttatgaggtcacagacatgatgcagaaggctctcttcgacttcctcaaacacagatttgatggcaggatctccatcacccgagtcacagccgacctctccctggcaaagcgatctgtgctcaacaatccgggcaagaggaccatcattgagcgctcctctgcccgctccagcattgcggaagtgcagagtgagatcgagcgcatatttgagctggccaaatccctgcagctagtagtgttggacgctgacaccatcaaccacccagcacagctggccaagacctcgctggcccccatcatcgtctttgtcaaagtgtcctcaccaaaggtactccagcgtctcattcgctcccgggggaagtcacagatgaagcacctgaccgtacagatgatggcatatgataagctggttcagtgcccaccggagtcatttgatgtgattctggatgagaaccagctggaggatgcctgtgagcacctggctgagtacctggaggtttactggcgggccacgcaccacccagcccctggccccggacttctgggtcctcccagtgccatccccggacttcagaaccagcagctgctgggggagcgtggcgaggagcactccccccttgagcgggacagcttgatgccctctgatgaggccagcgagagctcccgccaagcctggacaggatcttcacagcgtagctcccgccacctggaggaggactatgcagatgcctaccaggacctgtaccagcctcaccgccaacacacctcggggctgcctagtgctaacgggcatgacccccaagaccggcttctagcccaggactcagagcacaaccacagtgaccggaactggcagcgcaaccggccttggcccaaggatagctactgacagcctcctgctgccctaccctggcaggcacaggcgcagctggctggggggcccactccaggcagggtggcgttagactggcatcaggctggcactaggctcagcccccaaaaccccctgcccagccccagcttcagggctgcctgtggtcccaaggttctgggagaaacaggggaccccctcacctcctgggcagtgacccctactaggctcccattccaggtactagctgtgtgttctgcacccctggcaccttcctctcctcccacacaggaagctgccccactgggcagtgccctcaggccaggatccccttagcagggtccttcccaccagactcagggaagggatgccccattaaagtgacaaaagggtggggtgtgggcaccatggcatgaggaagaaacaaggtccctgagcaggcacaagtcctgacagtcaagggactgctttggcatccagggcctccagtcacctcactgccatacattagaaatgagacaatcaaagccccccccagggtggcacacccatccgtttgctggggtgtggcagccacatccaagactggagcagcaggctggccacgctcgggccagagagagctcacagctgaagctcttggagggaagggctctcctcaccctgccaggaagcttcttaacatgtgacaggaccagggaccaggagcatggtgaagccaagtggcagatgggagccaacctggatgggggtttggggaaggagggcatgtgtagcagagaacttaggggggcctccttgcctttctcattcttttgccctgcatcctgtcatttctgttcttgtccctcatacatctttggagaaccgggctccagactttgttccctgactcatagctgccgcttgttaggttagggttagatggggagagacagggcacagaggacctgtctccccggctactcttgccttatggctctagtgtgtgacctacagagcatgctccacaagcccctgcctcacctcactgtcatcactaataaacatcatgcacagtc

SEQ ID NO: 2751 - DNA, 65608 bp, Homo sapiens; identical to SEQ ID NO: 1247
  misc_feature (1)..(65608): n=a,t,g or c

SEQ ID NO: 2752 - DNA, 1356 bp, Homo sapiens
ttctcccgcaaccttcccttcgctccctcccgtcccccccagctcctagcctccgactccctccccccctcacgcccgccctctcgccttcgccgaaccaaagtggattaattacacgctttctgtttctctccgtgctgttctctcccgctgtgcgcctgcccgcctctcgctgtcctctctccccctcgccctctcttcggcccccccctttcacgttcactctgtctctcccactatctctgcccccctctatccttgatacaacagctgacctcatttcccgataccttttcccccccgaaaagtacaacatctggcccgccccagcccgaagacagcccgtcctccctggacaatcagacgaattctccccccccccccaaaaaaaaaagccatccccccgctctgccccgtcgcacattcggcccccgcgactcggccagagcggcgctggcagaggagtgtccggcaggagggccaacgcccgctgttcggtttgcgacacgcagcagggaggtgggcggcagcgtcgccggcttccagacaccaatgggaatcccaatggggaagtcgatgctggtgcttctcaccttcttggccttcgcctcgtgctgcattgctgcttaccgccccagtgagaccctgtgcggcggggagctggtggacaccctccagttcgtctgtggggaccgcggcttctacttcagcaggcccgcaagccgtgtgagccgtcgcagccgtggcatcgttgaggagtgctgtttccgcagctgtgacctggccctcctggagacgtactgtgctacccccgccaagtccgagagggacgtgtcgacccctccgaccgtgcttccggacaacttccccagataccccgtgggcaagttcttccaatatgacacctggaagcagtccacccagcgcctgcgcaggggcctgcctgccctcctgcgtgcccgccggggtcacgtgctcgccaaggagctcgaggcgttcagggaggccaaacgtcaccgtcccctgattgctctacccacccaagaccccgcccacgggggcgcccccccagagatggccagcaatcggaagtgagcaaaactgccgcaagtctgcagcccggcgccaccatcctgcagcctcctcctgaccacggacgtttccatcaggttccatcccgaaaatctctcggttccacgtccccctggggcttctcctgacccagtccccgtgccccgcctccccgaaacaggctactctcctcggccccctccatcgggctgaggaagcacagcagcatcttcaaacatgtacaaaatcgattggctttaaacacccttcacataccctcccccc

SEQ ID NO: 2753 - DNA, 3587 bp, Homo sapiens
ctaagctggggtccatggagcctgcacccgcccgatctccgaggccccagcaggaccccgcccggccccaggagcccaccatgcctccccccgagaccccctctgaaggccgccagcccagccccagccccagccctacagagcgagcccccgcttcggaggaggagttccagtttctgcgctgccagcaatgccaggcggaagccaagtgcccgaagctgctgccttgtctgcacacgctgtgctcaggatgcctggaggcgtcgggcatgcagtgccccatctgccaggcgccctggcccctaggtgcagacacacccgccctggataacgtctttttcgagagtctgcagcggcgcctgtcggtgtaccggcagattgtggatgcgcaggctgtgtgcacccgctgcaaagagtcggccgacttctggtgctttgagtgcgagcagctcctctgcgccaagtgcttcgaggcacaccagtggttcctcaagcacgaggcccggcccctagcagagctgcgcaaccagtcggtgcgtgagttcctggacggcacccgcaagaccaacaacatcttctgctccaaccccaaccaccgcacccctacgctgaccagcatctactgccgaggatgttccaagccgctgtgctgctcgtgcgcgctccttgacagcagccacagtgagctcaagtgcgacatcagcgcagagatccagcagcgacaggaggagctggacgccatgacgcaggcgctgcaggagcaggatagtgcctttggcgcggttcacgcgcagatgcacgcggccgtcggccagctgggccgcgcgcgtgccgagaccgaggagctgatccgcgagcgcgtgcgccaggtggtagctcacgtgcgggctcaggagcgcgagctgctggaggctgtggacgcgcggtaccagcgcgactacgaggagatggccagtcggctgggccgcctggatgctgtgctgcagcgcatccgcacgggcagcgcgctggtgcagaggatgaagtgctacgcctcggaccaggaggtgctggacatgcacggtttcctgcgccaggcgctctgccgcctgcgccaggaggagccccagagcctgcaagctgccgtgcgcaccgatggcttcgacgagttcaaggtgcgcctgcaggacctcagctcttgcatcacccaggggaaagatgcagctgtatccaagaaagccagcccagaggctgccagcactcccagggaccctattgacgttgacctggccgaggaggcagagagagtgaaggcccaggttcaggccctggggctggctgaagcccagcctatggctgtggtacagtcagtgcccggggcacaccccgtgccagtgtacgccttctccatcaaaggcccttcctatggagaggatgtctccaatacaacgacagcccagaagaggaagtgcagccagacccagtgccccaggaaggtcatcaagatggagtctgaggaggggaaggaggcaaggttggctcggagctccccggagcagcccaggcccagcacctccaaggcagtctcaccaccccacctggatggaccgcctagccccaggagccccgtcataggaagtgaggtcttcctgcccaacagcaaccacgtggccagtggcgccggggaggcagaggaacgcgttgtggtgatcagcagctcggaagactcagatgccgaaaactcggtgagtggcccagaagttcagcccaggactcctgcctccccccatttcaggtcccagggggcacagccacagcaggtgactctcagacttgccttgcgcctggggaattttccagtgaggcattgagtcccaagctgtgctgaggacagtctccaaatgacagctgcatgcctggaccaccccagccctcccactacaccagggccaggagctcttctgaaatgctgatagcatgtgtccagagcactgtctcttttctggaatgtccaagacctttgtctggagcttccttatgcattttctgtcctctaagtcctcagtgaggagggctggacaagaatccattccttggtttattacagccagtgggggccagtgaaggggtgtcaggccacagggcagctatataggggccaaacaagtgaggtttgactccatccatgtagaaagatatataaatccattccacagtgaaacaggtggcctcgtgggtagtgacccttctgtccctagaggtttattactagaggctggactatcacctgtccaggggaaaaggggatctgaatagagtgaaaggttggactgggtggcccctgaggtctcttccagccctcagtctgaggttctgtattggaaagtgcatggaacccatggagaccgccgagccacagtcctcgccagcccactcctcgccagcccactcctcgccagtccagtctctgctgagagcacaaggagcctccagcctgccctgtggcacataccaccccccagcttggcctccccaccagcccgctgagcaggctgccacccccgatgctgagcctcacagcgagcctcctgatcaccaggagcgccctgccgtccaccgtgggatccgctacctgttgtacagagcacagagagccatccgccttcgccatgccctccgcttgcaccctcaattgcatcgggcccctattcggacttggtctccccatgtggtccaagccagcactcctgccatcacagggcccctcaaccatcctgccaatgcccaggaacatcctgcccagctgcaaaggggcatcagcccaccccaccggatacgaggggctgtgcgatcccgcagccgctccctccggggctcctcccatttatcccagtggctcaacaacttttttgccctccccttctcctccatggcttcccagcttgacatgtcttccgtggtgggggcaggggaaggcagagcccagactcttggagcagttgttccccctggggactctgtcagaggctccatggaggcctctcaagtccaagtgcctctggaagcctctccaattacattcccaccaccctgtgccccagaaaggccccccatcagcccagtcccaggcgcccgtcaagcaggcctctgagagtgctacccttctcttgtaaccttgcagccaacacccctgcccggcccctgagctgcctcctccagcccatgctcttacaggccctgcacagagtagcactcattaattcttggttaaggaatgaatcaacgaatgaatggctatgcatggacctctgggcagggagacctgggtcttctctggctgagaggggaaggctaaggcatggctgagattcaagccaccattccaggcctctttgcccaagaaagaaacttctgtcacccttgcactctcctgtgttctgagtccctggccaatagcacagccttccatgccccgacccccaccccaagcctctccactaggcctctgccaggatctaagcccatgagcacagggactggctatcccaagacctggcagatgtggctgctcaataaacacttgttgaaccatcaaaaaaaaaaaaaaa

SEQ ID NO: 2754 - DNA, 4068 bp, Homo sapiens; identical to SEQ ID NO: 1249

SEQ ID NO: 2755 - DNA, 322 bp, Homo sapiens; identical to SEQ ID NO: 1662

SEQ ID NO: 2756 - DNA, 736 bp, Homo sapiens
ggctctcaccctcctctcctgcagctccagctctgtgctctgcctctgaggagaccatggcccggcctctgtgtaccctgctactcctgatggctaccctggctggggctctggcctcgagctccaaggaggagaataggataatcccaggtggcatctatgatgcagacctcaatgatgagtgggtacagcgtgcccttcacttcgccatcagcgagtacaacaaggccaccgaagatgagtactacagacgcccgctgcaggtgctgcgagccagggagcagacctttgggggggtgaattacttcttcgacgtagaggtgggccgcaccatatgtaccaagtcccagcccaacttggacacctgtgccttccatgaacagccagaactgcagaagaaacagttatgctctttcgagatctacgaagttccctgggaggacagaatgtccctggtgaattccaggtgtcaagaagcctaggggtctgtgccaggccagtcacaccgaccaccacccactcccaccccctgtagtgctcccacccctggactggtggcccccaccctgcgggaggcctccccatgtgcctgtgccaagagacagacagagaaggctgcaggagtcctttgttgctcagcagggcgctctgccctccctccttccttcttgcttctaatagacctggtacatggtacacacacccccacctcctgcaattaaacagtagcatcgcc

SEQ ID NO: 2757 - DNA, 565 bp, Homo sapiens
aattcgctcggctttgacagagtgcaagacgatgacttgcaaaatgtcgcagctggaacgcaacatagagaccatcatcaacaccttccaccaatactctgtgaagctggggcacccagacaccctgaaccagggggaattcaaagagctggtgcgaaaagatctgcaaaattttctcaagaaggagaataagaatgaaaaggtcatagaacacatcatggaggacctggacacaaatgcagacaagcagctgagcttcgaggagttcatcatgctgatggcgaggctaacctgggcctcccacgagaagatgcacgagggtgacgagggccctggccaccaccataagccaggcctcggggagggcaccccctaagaccacagtggccaagatcacagtggccacggccatggccacagtcatggtggccacggccacaggccactaatcaggaggccaggccaccctgcctctacccaaccagggccccggggcctgttatgtcaaactgtcttggctgtggggctaggggctggggccaaataaagtctcttcctccaagct

SEQ ID NO: 2758 - DNA, 2155 bp, Homo sapiens
gtcacatggggtgcgcgcccagactccgacccggaggcggaaccggcagtgcagcccgaagccccgcagtccccgagcacgcgtggccatgcgtcccctgcgcccccgcgccgcgctgctggcgctcctggcctcgctcctggccgcgcccccggtggccccggccgaggccccgcacctggtgcaggtggacgcggcccgcgcgctgtggcccctgcggcgcttctggaggagcacaggcttctgccccccgctgccacacagccaggctgaccagtacgtcctcagctgggaccagcagctcaacctcgcctatgtgggcgccgtccctcaccgcggcatcaagcaggtccggacccactggctgctggagcttgtcaccaccagggggtccactggacggggcctgagctacaacttcacccacctggacgggtacttggaccttctcagggagaaccagctcctcccagggtttgagctgatgggcagcgcctcgggccacttcactgactttgaggacaagcagcaggtgtttgagtggaaggacttggtctccagcctggccaggagatacatcggtaggtacggactggcgcatgtttccaagtggaacttcgagacgtggaatgagccagaccaccacgactttgacaacgtctccatgaccatgcaaggcttcctgaactactacgatgcctgctcggagggtctgcgcgccgccagccccgccctgcggctgggaggccccggcgactccttccacaccccaccgcgatccccgctgagctggggcctcctgcgccactgccacgacggtaccaacttcttcactggggaggcgggcgtgcggctggactacatctccctccacaggaagggtgcgcgcagctccatctccatcctggagcaggagaaggtcgtcgcgcagcagatccggcagctcttccccaagttcgcggacacccccatttacaacgacgaggcggacccgctggtgggctggtccctgccacagccgtggagggcggacgtgacctacgcggccatggtggtgaaggtcatcgcgcagcatcagaacctgctactggccaacaccacctccgccttcccctacgcgctcctgagcaacgacaatgccttcctgagctaccacccgcaccccttcgcgcagcgcacgctcaccgcgcgcttccaggtcaacaacacccgcccgccgcacgtgcagctgttgcgcaagccggtgctcacggccatggggctgctggcgctgctggatgaggagcagctctgggccgaagtgtcgcaggccgggaccgtcctggacagcaaccacacggtgggcgtcctggccagcgcccaccgcccccagggcccggccgacgcctggcgcgccgcggtgctgatctacgcgagcgacgacacccgcgcccaccccaaccgcagcgtcgcggtgaccctgcggctgcgcggggtgccccccggcccgggcctggtctacgtcacgcgctacctggacaacgggctctgcagccccgacggcgagtggcggcgcctgggccggcccgtcttccccacggcagagcagttccggcgcatgcgcgcggctgaggacccggtggccgcggcgccccgccccttacccgccggcggccgcctgaccctgcgccccgcgctgcggctgccgtcgcttttgctggtgcacgtgtgtgcgcgccccgagaagccgcccgggcaggtcacgcggctccgcgccctgcccctgacccaagggcagctggttctggtctggtcggatgaacacgtgggctccaagtgcctgtggacatacgagatccagttctctcaggacggtaaggcgtacaccccggtcagcaggaagccatcgaccttcaacctctttgtgttcagcccagacacaggtgctgtctctggctcctaccgagttcgagccctggactactgggcccgaccaggccccttctcggaccctgtgccgtacctggaggtccctgtgccaagagggcccccatccccgggcaatccatgagcctgtgctgagccccagtgggttgcacctccaccggcagtcagcgagctggggctgcactgtgcccatgctgccctcccatcaccccctttgcaatatattttt

SEQ ID NO: 2759 - DNA, 1759 bp, Homo sapiens
gacccaatccaggccagagtctttctctcaggggcttcctcgtgctcagctaatcctccgatcaatccttgggaatccctgggacctcttcggtatccctactctcagccagggatcatgtcttgggccgctcgcccgcccttcctccctcagcggcatgccgcagggcagtgtgggccggtgggggtgcgaaaagaaatgcattgtggggtcgcgtcccggtggcggcggcgacggccctggctggatcccgcagcggcggcggcggcggcggtggcaggcggagaacaacaaaccccggagccggagccaggggaggctggacgggacgggatgggcgacagcgggcgggactcccgaagcccagacagctcctccccaaatccccttccccagggagtccctcccccttctcctcctgggccacccctacccccttcaacagctcctacccttggaggctctggggccccacccccacccccgatgccaccacccccactgggctctccctttccagtcatcagttcttccatggggtcccctggtctgccccctccagctcccccaggattctccgggcctgtcagcagcccccagattaactcaacagtgtcactccctgggggtgggtctggcccccctgaagatgtgaagccaccagtcttaggggtccggggcctgcactgtccaccccctccaggtggccctggggctggcaaacggctatgtgcaatctgcggggacagaagctcaggcaaacactacggggtttacagctgtgagggttgcaagggcttcttcaaacgcaccatccgcaaagaccttacatactcttgccgggacaacaaagactgcacagtggacaagcgccagcggaaccgctgtcagtactgccgctatcagaagtgcctggccactggcatgaagagggaggcggtacaggaggagcgtcagcggggaaaggacaaggatggggatggggagggggctgggggagcccccgaggagatgcctgtggacaggatcctggaggcagagcttgctgtggaacagaagagtgaccagggcgttgagggtcctgggggaaccgggggtagcggcagcagcccaaatgaccctgtgactaacatctgtcaggcagctgacaaacagctattcacgcttgttgagtgggcgaagaggatcccacacttttcctccttgcctctggatgatcaggtcatattgctgcgggcaggctggaatgaactcctcattgcctccttttcacaccgatccattgatgttcgagatggcatcctccttgccacaggtcttcacgtgcaccgcaactcagcccattcagcaggagtaggagccatctttgatcgggtgctgacagagctagtgtccaaaatgcgtgacatgaggatggacaagacagagcttggctgcctgagggcaatcattctgtttaatccagatgccaagggcctctccaaccctagtgaggtggaggtcctgcgggagaaagtgtatgcatcactggagacctactgcaaacagaagtaccctgagcagcagggacggtttgccaagctgctgctacgtcttcctgccctccggtccattggccttaagtgtctagagcatctgtttttcttcaagctcattggtgacacccccatcgacaccttcctcatggagatgcttgaggctccccatcaactggcctgagctcagacccagacgtggtgcttctccacactggaggagc

SEQ ID NO: 2760 - DNA, 1220 bp, Homo sapiens
gaattcgttctttcactctttgcaataaatcttgctactgttcactctttgggtccacactgcttttatgagctataacactcaccgcaaaggtctgcagcttcactcctgaagccagcgagaccacaagcccactgggaggaacgaacaactccaggcgcgcaatgaacaactccaggcgcgccgccttaagagctgtaacatcaccgcgaaggtctgcagtttcactcctaagccagcgagaccacgaacccaccagaaggaagaaactccaaacacatctgaacattagaaggaacaaactccagatgcgcacctttaagagcttgtaacactcaccgcgagggtccacggcttcattcttgaagtcaagtgatgaaggatgcaagaacccaccaattccggacacattttgtcgaccatgaaggactttcgcctattgccaagcggtgagacaatcgctgagcagtgagaccatcacctattgccgagcggtgagaccattgcctatcgccaagcaaatcgaggccatcaagctacagatggtcttacaaatggaaccccaaatgagttcaactaacaacttctaccgaggacccctggactgaccagctggtcctggcacttcccctggcctagagagttcccctctgaaggacactacaactgcaaagccccttcttcgcccctatccagcaggaagtagctagagcagtcatcggccaaattcccaacagcagttggggtgtcctgttgattgaggggtgacagcatgctggcagtcctcacagccctcactcgctcgctcactctcggcacctcctctgcctgggctcccactttggcagcacttgaggagcccttcagctctgtatctagctactctgatgggtccttggagaacctttatgtctagctcagggattgtaatacaccatcagcaccctgtgtctagctcaggtttgtgaatgcaccaatggacactctgtatctagctactctggtggggccttggagaaccttgtgtcaacactctgtatctaactaacctggtggggatgtggagaaccttgtgtctagctcagggatgtaaacgcaccaatcagtgccctgtcaaaccactcggctctaccaatcagcaggatgtgggtggggccagataagagaataaaagcaggctgcccgagccagcagtggcgaaaaaaaaaaaaaaggaattc

SEQ ID NO: 2761 - DNA, 3345 bp, Homo sapiens; identical to SEQ ID NO: 781

SEQ ID NO: 2762 - DNA, 2846 bp, Homo sapiens
gaattcggggcgctacggcggacccggctgggcagttccttccccagaaggagagattcctctgccatggagtcctacgatgtgatcgccaaccagcctgtcgtgatcgacaacggatccggtgtgattaaagctggttttgctggtgatcagatccccaaatactgctttccaaactatgtgggccgacccaagcacgttcgtgtcatggcaggagcccttgaaggcgacatcttcattggccccaaagctgaggagcaccgagggctgctttcaatccgctatcccatggagcatggcatcgtcaaggattggaacgacatggaacgcatttggcaatatgtctattctaaggaccagctgcagactttctcagaggagcatcctgtgctcctgactgaggcgcctttaaacccacgaaaaaaccgggaacgagctgccgaagttttcttcgagaccttcaatgtgcccgctcttttcatctccatgcaagctgtactcagcctttacgctacaggcaggaccacaggggtggtgctggattctggggatggagtcacccatgctgtgcccatctatgagggctttgccatgccccactccatcatgcgcatcgacatcgcgggccgggacgtctctcgcttcctgcgcctctacctgcgtaaggagggctacgacttccactcatcctctgagtttgagattgtcaaggccataaaagaaagagcctgttacctatccataaacccccaaaaggatgagacgctagagacagagaaagctcagtactacctgcctgatggcagcaccattgagattggtccttcccgattccgggcccctgagttgctcttcaggccagatttgattggagaggagagtgaaggcatccacgaggtcctggtgttcgccattcagaagtcagacatggacctgcggcgcacgcttttctctaacattgtcctctcaggaggctctaccctgttcaaaggttttggtgacaggctcctgagtgaagtgaagaaactagctccaaaagatgtgaagatcaggatatctgcacctcaggagagactgtattccacgtggattgggggctccatccttgcctccctggacacctttaagaagatgtgggtctccaaaaaggaatatgaggaagacggtgcccgatccatccacagaaaaaccttctaatgtcgggacatcatcttcacctctctctgaagttaactccactttaaaactcgctttcttgagtcggagtgtttgcgaggaactgcctgtgtgtgagtgcgtgtgtggatatgagtgtgtgcgcacatgcgagtgccgtgtggccctgggaccctgggcccagaaaggacgatgaactacccgcagtggtgatgcctgaggcctggggttgaccactaactggctcctgacagggaagagcgctggcagaggctgtgctccctcctcaggtggcctctggctggctgtgggggactccgtttactaccacagggagacagagggaggtaagccatcccccgggagaccttgctgctgaccatcctaggctgggctggcccaccctcacccccacccccagggtgccctgaggccccaggcagctgctgcctccactatcgatgcctcctgactgcacactgaggactgggactggggttgagttctgtctggttttgttgccattttggtttgggaggctggaaaagcaccccaagaagctattacagagactggagtcaggagagagcaggaggccctcatgttcaccagggaacaggaccacaccggccactgaaggagggcaggagcagtcctccctctgaatggctgcagagttaatgttcccagcccagtcccctttcgggggccttgggagagtttaaggcacctgctggttccaggacctcgctttccatctgttcttgttgcaatgccatcttcaaaccgttttatttattgaagtgtttgttcagttaggggctggagagagggagcttgctgcctcctgccttgctacactaatgtttacagcacctaagcttagcctccagggccccacctctcccagctgatggtgagctgacagtgtccacaggttccaggaccatttgagattggaagctacactcaaagacactcccaccaggctctttctcccttttcctcttctcactgccctggaatcaacaggctggttgctggttagattttctgaaacaggaggtaaaatttttctttggcagaggcccctaagcaagggaggggtgttggagagccagtgcccttaagactggagaaagctgcaatttaccaagttgccttttgccactgtagctgaccaggggactaggttgtagaggtgggaaggcccctctgggctgatcttgtgccattcttgaccttggacctgcttggttaaggagggagtgggccagaccagagtgccaggagctaatggagccaggcctgacacctaggagtggtccaaagccttcagcctagatggtgcaaagctggggccagcctgtcttcaccggcaccctcacctgtgacaccaagacccaccccaatccagacttcacacagtattctcccccacgccgtctatgaccaaaggcccctgccaggtgtgggtccacagcagcaggtatgtgtgaaagcaacgtagcgccccgcggactgcagtgcgcttaaccaactcacctcccttctcttagcccaagcctgtccctcgcacagcctcgcacaaaccacattgcctggtggggcccagtgtactgaaataaagtcgttccgatagacacgtcaaaaaaaaaaaacccgaattc

SEQ ID NO: 2763 - DNA, 1579 bp, Homo sapiens
cagctgaggcgttctccgcttagtgcctacggcatgggtcagctctttctgccacctccgccttcgcggtcctcacctctttgcgggtgaagttaccttttgggtttccagaccttgggggcctgaggcaaactcggggacgaacccctaacccacctctcttttctgtcattctccaactcttactttgtaccacggaatcacttggccttaaagctagccagctcggccgtgccttgaggccaggttcgagagataaaggtaaccgtggggaaagcggccccccagtggacaaaggcggaggcaagaatagagcaggcctgagggccataggcgatgagaataggcagttgaggggtgaaaaagaaaacaaacaaacaacaacaacaaaccctgaagagtactgaagatttagaagggactggaaaggacttgttgcgcaatggaagaatctgactctgagaaaacgacggagaaagaaaatctggggccgagaatggatccaccactaggggaaccggaaggatcgcttgggtgggtgctaccaaatacagccatgaagaaaaaggtgctgttgatgggtaaaagtgggtctggtaagaccagcatgaggtctattatctttgcaaattatattgccagagacacacgtcgccttggcgcaacaatactagaccgtatacatagtcttcaaattaatagcagtttgagcacctactctctcgtagactctgttggaaatacaaagacatttgatgtagaacattctcatgttcgatttctgggaaacctggtattgaacctgtgggattgtggtgggcaagacaccttcatggaaaattatttcactagccaacgggacaacatcttccgaaatgtggaggttctgatttatgtctttgatgtggagagccgcgaactggaaaaggacatgcactattaccaatcatgcctggaggccattctgcagaattctccagatgccaaaatattttgcttggtacacaaaatggatctggtacaggaggatcaacgggacctgatttttaaagagcgagaagaagatttgaggcgtttgtctcgcccattggaatgttcttgtttccgaacatctatctgggatgaaaccctctataaggcttggtccagcatagtttatcagctgattcccaatgttcagcagctggaaatgaacctaaggaattttgctgaaattatcgaagctgatgaagtacttctttttgagagagctacttttctggtaatttctcactatcagtgtaaagagcagcgtgatgcccatagatttgagaaaataagcaacattattaagcagttcaagctgagctgcagcaagctggctgcctctttccagagtatggaagtcaggaactctaacttcgctgctttcattgacatctttacatccaacacttatgtgatggttgtagtgtctgatccgtccattccttctgcagctactctgatcaacatccgcaatgccaggaaacactttgaaaagctggaaagagtggatggaccaaagcagtgtcttctcatgcgctaaacattagtagta

SEQ ID NO: 2764 - DNA, 946 bp, Homo sapiens
cttctgactgggctcaggctgacaggtagagctcaccatggcttcttgtgtccttgtcccctccccatcacagctgtggtgcagtccaccgtctccagtggctatggcggtgccagtggtgtcggcagtggcttaggcctgggtggaggaagcagctactcctatggcagtggtcttggcgttggaggtggcttcagttccagcagtggcagagccattgggggtggcctcagctctgttggaggcggcagttccaccatcaagtacaccaccacctcctcctccagcaggaagagctataagcactaaagtgcgtctgctagctctcggtcccacagtcctcaggcccctctctggctgcagagccctctcctcaggttgcctgtcctctcctggcctccagtctcccctgctgtcccaggtagagctggggatgaatgcttagtgccctcacttcttctctctctctctataccatctgagcacccattgctcaccatcagatcaacctctgattttacatcatgatgtaatcaccactggagcttcactgttactaaattattaatttcttgcctccagtgttctatctctgaggctgagcattataagaaaatgacctctgctccttttcattgcagaaaattgccaggggcttatttcagaacaacttccacttactttccactggctctcaaactctctaacttataagtgttgtgaacccccacccaggcagtatccatgaaagcacaagtgactagtcctatgatgtacaaagcctgtatctctgtgatgatttctgtgctcttcactgtttgcaattgctaaataaagcagatttataatacatatattcttttactttgccttgctttggggccaaagttttgggcttaaacttttttatctgataagtgaatagttgtttttaaaagataatcta

SEQ ID NO: 2765 - DNA, 35641 bp, Homo sapiens
gatcaaacggacttaacacaaattcattatcttccagttctgggggtcggaagtccaaaatgggtggatagagctgcagtcctcccgggagccctaggggagaatccatttccttgcctttttcagcttgtaagggctgcattccttggttcagtgcccgttccacatcactctgaactcggcctcctgtcacatctctgaatctgaccctcctacctctctctttctcttataagcacatttgtgatacattgagcccacctggataatccatataatccccccatctcaagaaccttaacatactcacatctgcaaacccccctttgccacataaaacaacctacaggctccagggattaggatatgaacatctttgggaagccgatattctgcctaccaccgcttgggagtcaggtttgaatttcagctttgtcatttcaatcttcatttcctaaatatgtgttgagtacccccatatcacgtcctgaaatagatctaagaaatacactaactagctcccgtggccttgcccaagttatataacctccctgcacctccatttttctcactggcagaactgacgagattaatatctgcctcagaggaaacgctgtatgtaaagtgtctgccggcaaccctttccacttaaacagcattcaggaattatatgctattttcatcttgacaaaatgtaagcaaaataccagattaagcagtaaagaggtagaggaacagatcctcttggaaacggctagtgtgaatgtgaattggtataggctttctagagggcaatgtggcaatgtgaatggaatgaaaagccttacaaatttttttctctttatcccagtgattattcatttctagacgtgtatctgaaggccacggctgaatttacatacaaagatgtttagtgaaatattatttatattactggaagggaaaaagcagaaacagactaaatgtcctctaataagcaattaggtaagtacacccacataatggaaatctcatcagccatataaaaggactttgtaaaagaatatgaaacatcatgttcagaggtttgccaaatgttaatgacaaagctggggatttaaatcagggatattaattatctcgtgtcggtaaaagaactccgtgtgatgagagaatgtgtatatagatagaaaaaaaaggactaaataaaatagatttcgtgatgttaacagtggttatttccaagtaatggaaacaagtgattttcatttttgtttacttgtattttctattttctaataacaaaggtggggggtttctatacaaaacaattcctctactagttcaactatcaggcatttctaggtatagaacaaacactgcgggaggtgtccctctagtggaaggagggatttttaaaaatagtttattgtattgaagtctttgggaggcaaacagaggtctgaagtcagtaaatgattctgcttattccacagccactgcactccagcctgggcaacatatcaacatcctgtctcgggaaagaaaaaaaaaattaaaagaaggatggggagtaatcgcaaaaggaagggccaaaaaccaccctaggaaacaggtgctactaactcttggcgcatttggaatattgaccagtaactttttcaactgtcgatgtcgggggattaagctccttaggcttacttccccttcccttgctttttggcagcttgaggctagggtgccaggggatgtggaaactcaaaagagacgtgaatggagcctgatatctgcaagctacaccgacagggggcgccagcccctacaggtgactccatgaatcttcggctccactcggctcttcttcggctgagttcggccaacgcttgccttctcaggctcggctctcttcggctttctgagagcgcgcctgtcgtggcctcggctcctcttcggctgcgttcggcccacgatcatctcagtctcagctctcctcggctacgttcggctggctgccgtcctctcggactcggctctcttcggttgagttcggcctactctccactaggagtcggcttccttcggctgcgttcggctgcgacccggaagagcttccatggagtcagggcagccggctcgacggattgccatggcgccgctgctggagtacgagcgacagctggtgctggaactgctcgacactgacgggctagtagtgtgcgcccgcgggctcggcgcggaccggctcctctaccactttctccagctgcactgccacccagcctgcctggtgctggtgctcaacacgcagccggccgaggaggtgcggccgcgctggcgcgggagtgaggggactccgagagtgttgagggcctcctgagcggatgcgaggcctctgacagggatggaggggctctgagggggattcaggcccctgacactacgcgatgacacagagaaggatggcaggggtccccagggggatgcaggtccctcacactgcgggaacacagacgtatgtaaggggtcgctaggaggataccggtcgctcacaccgtgcggggacactgataagaattggaggggccccgagaaggctgcaggtccctggcaggagttgaagaacactaagaggaatgccagtccctgacactgtgcggggactctgagagggaagggaggggtcccaagaaggatgcaagtctttgaccagagttcaagaacactaagagaaatgggaggggtccccaggggatgcgggtccctgacactgtgcaggcacagtgagaatgatggaaggggtcccgagaaggatgcaattccctgacaacactaagagggatgggaggggtccccagaaggatgcaggtccctgacatgggtgcaagggcactgaaaggtgaaggggctctgagtggtaggagaggatcggaggtcgctgcaggggagggggagatgtcggaaggaggatctggataggaataacgggagagtcctgaagttggccattaagggagtttctgggggcagaaggaaggtccctgaaagggaacagtgatgaggatggaagatctctgagggtgatggggagacatgaaaggagatgctgaggcgctggaaaaaccccaatagggaaaaggagggaccaggaaataggacattcaccaaggctgtgttaagagggccatagggtcagaaagggattggagcttgacgctgaggatgttggcaaaggttaactacagttaaggacaatggagaacactgagaaagatggaatggggctacacatgggtctgaggggtgttgagaggggacacagcttggtcggacaagtctgatgatcccctagatatatcaggtggccgggagaaaaatgtcagctgagaagagtgaccacagtctctttgagggcagggatcctgtttgattcatctaggtatccccagtgcttggcatagggcctaaggcaacacacagggcctagtaaagatggttttaaactggggatataaataaaccaagccaagggacccagtgacatgaagtccctctaggatagattagcacagaactgatagtctaaaacattgtctggggaaaggattcccttgttatcatctcatagaatgtgcttggctacaaacctggctttggtgggaagtattttctaggtagcagaaatcttttaatccaggcttttaaaagtttgaggttttgtatgtgtgtgcatatgttattgtagttgagtgctgataatgactgaagtgcaattattccttagtgtaaaccccaaaacaagaaaacctcattaaatgtagactggttggctgaagttactataaagaagtaacttagtgtgtatattcattattaagttcattatctcagagaaagacagcacattattttaaatatctgtgacctattaaaaactgccctgtattaaatagcctactaatcaagtttgatttgatttaggagtattttatcaatcagctgaagatagaaggagttgaacacctccctcgccgtgtaacaaatgaaatcacaagcaacagtcgctatgaagtttacacacaaggtggtgttatatttgcgacaagtaggatacttgtggttgacttcttgactgatagaataccttcagatttaattactggtaagaatttgaaatcttattattagtatgtaaatttgtacttttttttttttaagtacaatttccattttatttttctccagagaatagtctgtcttcagtcttgaaggactcagctccctacatcacctttggtaggggtcgtggggcagcacccacaggtctaaatctgggtgggggtgttcggtccttgcaggcttcacaagatcgattcctgactactttgttgtgaattgcacaactcacacagtaatttagcttcacatacatcttgggaagcacataggcgtcgaagatgctcgcttcagaaatgtccctgactgctgtggcctccactgtgttttgaatgacgaatttcttaatggctttatccttgggcacacatcaggcacagttcgtgcagcaaataggctgcacatggccgcagccctttttggcatgaccgttgtcctttcttttctttgtcatcttggaggcacggaccggagagggtattttctacatttttatttttgtctgtctcctctgctgaacgctctactagaaccttctagtgggcactactggatccttttgttcaacattatgcttccaactttcagcatgatacctgacacattgtagatgctcagtaaatatctgtgacctgaataagtaactaaatgttagattaacttttcattgttttctaagctcttattcagtaaatacttgcaattcgttagcatttgcttttagaacttaatcagatttgaaatgtttataaataatctttgtatatttcctaaaatatttagttttcctccttaagatttttttggcattatttgaaattaaatcaagtagttgcttgcttattttgaggaaaaattattttagctagaattaaatagaaaagaaattcattttcattatcctttcaaaaccttttctgatgtccccaaagctaatgtaggggctgtgcctctgtgccctcatattaccctgtatttctccccagtcatagtgctcacaacactacattatatttatgtgtttgtctatctcactcacaagataagctgaagcacaaggaacaagttgttcatcccaggctaaataactggtacatggtaggcactaaagacgtatttgttgggtgaatgatggatggatatagtactgtgatcgttagtgaacttctggaggcagagagactctgaaattcataatcttattcccactgtatctgtcatgttgccctgaacctagatgaccctcaagaaaaatttgataaataaatgtgtcaatgaatgcttcaatggtaaaccgactgaagaagtttggttactcttttataacttttataattgttataaacagtatcataggctcacctggttttgaatgctaacaccctgcttacaaagcaaactccttaattttcattaaccccagttttctcattaagaaaacagtgcttcctgaagttattataaggattaagttaataaaataatttcttagtatagtgcctggtacacaacaaactcttagtaattcataccaaataaaattggccttttgtaaccagaaatcttgatacaccagtcttttactgtttgctgctttcttataagcttggttttactttattttttaaattgatttaaaaaaatttttttgttgtgtttaaaactaccactaggtgtcagtaatatcctgtgactttcagttacagtgcaacctaattaggcagagagcaatgtgaatttatgcaacgttgaagtctggcttatctgtagctcctaatgaaaaatgccaaattccctcctcctttctgatcaaagcccaccgaataatgaagctggagctgttactgatgcttggctgagtggaatgtaaatgaatgccaaaaatgaattcttttgaattctttcatcccctgggatcatcccccaggactgaccaaagagcagtgcgtgaagtgcaggtaaccctctggaaaggctgaatcccccagccccaacttcttcacctgtcaccacccattattaccaccacaccccaccctgggaatccctgctaaccagaactcctaacacgtgggagaactatataaatatctggtgaggttgtaccttgaaaagaacaggacaggaggatgctttcattgccaaaactgaccctgacatctccagacagaactaagaacacactttctgggaaatatatatgtatttttcagttacacttttgatttgtgtacccagtgctgtgcctccactttatattcattcaacaaatatttaactcactaagggtcccttgtttggcaggaagggtgctgaagatagacagatgaatgggacagtatggtgaactcgtgagttagactgcttctgggtttgagttatcttcatcttgcaccagctgtgtatttttaggcaagtttcttaatttctctatgcctcagcttactcacccgtacattggtgataaagatagtaccttcctcctaggattgtcagggtgaaatgaaatgcttatatgtaaaatacttggtagcatggcacatagtcagcattctatgatctctgtgatctctgcctgttggtgttacgatgttcctgttctcgggcagtttaatggaggagacaagtaaagaagtagttatagtacagtatgggtacaaaatgtcataggaacaaaaaaaactaaagtaggcttttgtggagctaaaactcctcccaaaaacctaacctgcttctattatttttattttttgaaaaaggagtgtcttgagttggtgtgactaaataggaataacatgattttacacatgatttggaaccttcggcctcccacttgcttgctggatgaccttggttaagttgcttcccttccttggtctcatcatgatacctactgcatggaattatcataacaattaaatgaaatgaaaatctatagaaacacctaacccagttacctgggatgtagtatcagttctcttcttcctcctgggttccaaccaaaataaagacaactttttggagcgcaacattttcttaaattgagtttctccttttctttggaagttcatttttattattcttgactctacgtaatatttcaatccaggctaacaaaatgtggcctcttagagtccttgggaaaacccaccaattaggtacagaatattttctgagtagtaaattagttatgtacgtgtattgggggggttattgaaaatcctttgtctatgaattcctaaataacattattaatttttactatatttggaagataatttgctgagctagagtaaatttagctccatccacctctatccaaaacttaaacattaaaatagtaaaatctgagtttagtttattgaactattagaagggtcataaatcactgttagtattattgtccatacccttccagatatgagaactggatcaaaagcatgcaagtaccattatgccaaatatatataaggtaaccagcttgatttaggtctaaaagacagactcgtcttggagtaattgtggttttgatctagaaagcatgtctgtatgcctttatgtcatctcatgtttctccctaacttagcactaatcacactgcatcagatgacacaatatatatgaaagatctgggtcagtagtctcatttcataaataacaaagcatgtataattgttcttatttttgagatgctgaggtgttataatcatgtacacccccaaagacatgtataagtatgtcgattgaaggtttttgttttaaatggactaatttacctctgaattgactatcttctgattctgaaaattgaattcatctcataggtaatgtagatgttgcccagacttctaaaatgtggctattttgtatagtccacatctgattcatacattaaaaaaaaaaaattcatgacctactttgctttcagaaattcttcctctgacatgccagaaacaccccaccccagggcctgtgccctcactgtcccctcagcctggcagcctggaactctcttggcccagatggtcacaaggctccatccagcctttattcagataccaccttggtgagaccacccctcatacatactccctctcctccttctctgattcattttttcttctcagcacttgtagcatcctaaatattttacgtatttatattgtttatagtcaattccttgaggacagggatttatctctgttctgtgcgtggctatatgcccagtctagaatggtgcttattcattctcttgtaagtacttaagaaaaatgtgatgaatgaatggcaattacctacctgttctgtagtttaaattatgtttctccccctcaggcatcttggtgtatagagcccacagaataatcgagtcttgtcaagaagcattcatcttgcgcctctttcgccagaaaaacaaacgtggttttattaaagctttcacagacaatgctgttgcctttgatactggtttttgtcatgtggaaagagtgatgagaaatctttttgtgaggaaactgtatctgtggccaaggtaaagaacattatgtgacaaataatgatgacattatttgtcatctttgtttgtgagatctactgtaacttagttgcactttgatgtaatataatgtaaaattcattgtaattttgtttgatagaacctagtcagttttataacaaacacatccagctataaatatgtattcaccaagtttgtggttttatttaagtcgagagcaatttgatggttgcttttctgctggtccatcacatccatccaagacagccactttattctttcttacacatttagggaaactcccagggatctagagacccacatatacaacagctttaggtgtacagcagatttattggctaacattaccacttctgctttgaaaattactcaacagggaaataaagcacaaaggttttgaagaagttttattaatttctaggaataacattaaggtttcagttttcaaacatttttgcaacctatgctaccatgtattttggttataatatatgttattttgagagtagttgtacaccgggtgcagtggcttacgcctgtaatcccagcgctttgggaggccaaggcaggcggatcacctgaggtcaggagttcgagaccagcctggtcaacatggtgaaaccctgtctctactataaatacaaaaattagccaggcgtgttggcacatgcctgtagtcccagctacttgggaggctgaggcaggagaatcacttgaacccaggaggcagaggttgcagtgagctgagatcgcaccattgcactccagcctgggcaacgagcgaaactccatctcaaaaaaaaaaaaaaaaaaaaagagtagttatagtatttttaactttcttgattataccttgttttaggagtcaacaaactcttcatgtaaatggccaggtagtaaatattttgggctttgcaggccatatagactgtcacaattactcaactctgttattgcccaaaaacaagtatagactgcttacataagtaatggtgtgactgcattccagtgagactatagaaacaggtacaggatttggcccagaccgtagtttgctgaccctttccttatctgaataatacactgcttctattcattgaggttcaaagtgtttttgaaaatgttgttgctttgcttttcatttgtttgttgttttgcttttcgtgttgtttgtagcatttataaaaatggggtgttaaaccaagaccagaaatacatagctgctgaaactctagaaaattgttgaaaaatatttgtctctttaggttccatgtagcagtaaactcatttttagaacagcacaaacctgaagttgtagaaatccatgtttctatgacacctaccatgcttgctatacagactgctatactggacattttaaatgcatgtctaaaggaactaaaatgccataacccatcgcttgaagtggaagatttatctttagaaaatgctattggaaaaccttttgacaaggtactctttttccttttaagcacagtttattatgttgtaattttaaagaatgcaagttattttaatatttgcaatgttgttaataggaatttgctgttatttaagaataaaattggaggtcacttaaaaacatagcttctttggtttactggaaagtaataatttatagtaaagtatgtggattggcatataagcatcactctgacttttgcagttatagtaagtgattatctcttattttaactataatcaagaagaaaataaataactttttttactttgaaatgacaacacttggatgtctacaggtagaagagttttacataagaatgctccataattgtacatgaatttatgatctcttttatggaataaaaaataatttggatgagttttcattactgaggagtgtgaaacttgctctgtcttaaaattacattctgaattgaggaaatggtaagacatcagttccaggaatttttattctaactaattttttattatagattaatattgcagatatataaatgtctactttttcattatagattaatattattacagatacataaacgtctagtattgaattggagatccagaaaatgctgaccttttagaaattcttggcagcctttttgtcatattctggtagaaaaagtttctgtcttttaaactctgagtcaatctctatgtcactggcaataatgcgtggcgattataaaaaaggaaaaaattgacttatttctctgattcttcaaaaaagtcagttgactatgaatattgatacataaaactaattttatatattctgttcctctgtgcttaaagttttttatgatttagtccatggtgattttttttaaatcccacacaatcttttaatagaatgtgtatatccctagaaaaataaaattgtagcctaacatgtttcacactgaatttctgttgattatcccccggttagtaacagtcacttcattgttttagatattcttttagtaaccatatctaaatatagatatcccatgtgtcttgttaaaatgtttaatattttgtagatgattttacaaaaaaggcatgtagttatatatcccagtttgttcaggatagtcccagtatctacctgttgtcctgcagtgattataaatagtgtatcatttctttttccacaagtgttctggtttagacaataaactatacagtcatccagatacttctcctgctcattattaaatttgttagataagattccgtgcaatggtactgcttttatatcaggctacaaatttctgattaaaaatcagataattctgtacctaaaaagtaacagaatcagtctgtgaaggaaacatacatatacatagctgtggatatgtaggtacctacatagtgtatacataaagctgttctttgttttagacagcattttggaatcttaaaaaataattggccgggtgcggtggctcacgcctgtaatcccagcactttgggaggccgaggcgggcagatcatgaggtcaggagatcgagaccatcctggctaacacggtgaaacctcgtctctactaaaaatacaaaaaatgagctgggcgtggtggcaacgcctgtagtcccagctacttgggaggctgaggcaggataatggcacgaacctgggaggcggaggttgcagtgagccgagattgtgccactgcactcgagcctggctacagagtgagactccatctcaaaataataataataataatcaaacttagtccattgttaatttaacaaatattttcctatcatgaatccactttagaaaaaaacactaaagaaatttttacaccaacaaattatggtacgttgttatttaatttgataattcttatttaatttgtacatgggcatcaaactaaatttttcatttcttggttataccttattttaaaggtcaaaaaacatgatactcatgtacaaattaaatagcaatgtaccttaatttgttagtaagccatcgtgcttgtgtatgccctctgcttggtccatttggatcccatgtctttatccatccaggatagtcagagtcaaacttggcaggaattgaacatatctgagctacatgcttagattctgttcataaaaacaaataattgattatctgatgtttataaggtcttttctcccctgacagtaatatatatttggatgatagattgactctatctgatcataaagattctagcagtaagacattcttctatatttgaaaatttaaacattattattagaattttattaactgaaatgttctagccacttccttgaataatgcttgcagtttttttattgtagtaaaatatatatgacataaaatttaccattttaaccatttttagatacacaggaaataatccttttgaaagtatgatttgtattaagaataactatacttaacatattttagcaataccaaattttattcttgttttagacaatccgccattatctggatcctttgtggcaccagcttggagccaagactaaatccttagttcaggatttgaagatattacgaactttgctgcagtatctctctcagtatgattgtgtcacatttcttaatcttctggaatctctgagagcaacggaaaaagcttttggtcagaattcaggtgggagattaaaatactaataatattctaagagctgatttgaataaagtgttaggttttagggggaatcaggtgtgaaaagtgctatattcaactatatgttatactgagatttcaaattatgttttatgttcatagcacaaagatgtaggttttattgatagctaatgtttccgcctacttaacgtctgttctgtataataataaatattcatatccgttccgggcaattttatttctagaaaagactgtgtgtagtacaggcagtcctcaacttagaaataggttgtgttctggaagtttagttgttaagaacttaaaattcattttcctcaaagcaaaagcaagggagtatggggcttccatcagctagagtgccaaagactgaagagcagaagagattttagggaaatatacatatacagctggccaccatctcgtttggctaccactgttttggcctctgtcactgtttgaccagaccagcggttttcaaagtgtggtccgtgaacccctggggtcaagatttaatacagttaataattctgatggttctttagggacattcttaagtgatgaactgcagaagcatgacagtaaagaatgcactgaatgccagtacactttcatggcactgccttggttcatgctacggcaccagcatgtacaattatggagcattcttatgtaaaactcttctacctgtagatatccaaatgttgtcatttcaaagtaaaaaatgttatttattttcctcttgattatagttaaaataagagataaccacttactatataactgcaaaagtcagagtgatgcttatatgccaatccacatattttcctataaattattactttccagtaaaccaaagaagctgtgttttaaatgacctccaattttattcttaaataacagcaaattcctattaacaacattgcaaatattaaaataacttgcttttacgccatcactggaaatgtcaacgcagtgaaaaaagtcaaataatgtcatggtattgttacgagaaaagttctgacatcacatagccctgaaaatatcttgggggcccctgggagttcacggaccacacccagaaaaccactggtccagctgaacagcgacagatcacagtagtgggaggcggtgtggttggtaggaagacaggatgacagccagttacgtatgtaggtcatgtgaccatcagagactgttttaaattaaccataaattgatggcactttttcttttaacttttcatattaggttggctgtttcttgactccagcacctcgatgtttataaatgctcgagcaagggtttatcatcttccagatgccaaaatgagtaaaaaagaaaaaatatctgaaaaaatggaaattaaagaaggggaaggtatcttgtggggttaagtctttaaatgtgttttttatttcggtatttggtatggaaatttaaagtgcaatttaaagtcttctttggccatgtgaaaagtgtgttccttgaagataaatgtatgtatgtttgttatatgtaacatgtaatgtatgttgaaagtatatatgtaaagtatatgtgtaatgtatgtcgaagtatacagcatggcaagtcttgcagtctattgcccagggcttccaaataacagatgtcaaatattgatcaaaagtatgctacatgaggagctatatattgatttttttagaacttcaaagtaattattatttttgagtcagaatgaggttggggcatggtggcacacacctataatcccagccctttgggaggccgaggcaggaggattgcttgagcccgggagttcaagaccatcctgggcaacaaagcaagactccatctctacaaaaaaaattttaaggctgggctcagtggctcacgtctgtaatcccagcactttgggaggctgaggcaggccgatcacctgaggtcaggagtttgagaccagcctggccaatatggtgaaaccccgtctctattaaaaataccaaaaattagccaggcgtggtggcgggcacctgtaatcccagctactcaggaggctgaggcaggagaatcacttgaacccaggaggcggaggttgcagtgagctgagatcacactactgcactccagcctgggcaacagagtgagactcggtctcaaaaaaaaaaaaaaaaaaaaacacaaaaacttttaaagtagcctggcgaggtgatgtgcacttatcgtctcagctacttgagaggctaaggtgagcccaggagttgaaggtgacaccaagatatgatcacaccactatactccagcctgggtgacagagtacgactgtgtctcaaaactaataaataaagtcaggatggaatatttgaatatcctttttaatttttaagcaacataaatatactagaatgaggcaaatatgggttttattccagcatcttatctagtgataccgtaaatatcactagttttttaaggcatgggatagggttaatgcctgctttctgcctagtttaaaggtctgtttcaaaacttaactgaggccgggcgcggtggctcatgcctgtaatcccagtactttgggaagccagtgcaggtggatcacctgaggtcaggagttcgagactagcctgaccaacatggtgaaatcctctctctactaaaaatacaaaattagccaggagtggtggcacatgcctgtaatcccagctacttgggaggctgaggcaggagacttgcttgaacccaggaggcagaggttgcaacgagccgagatcatgccattgcctccagcctgggcagtaagagtgaaacttcgtcttaaaaaaaaaaaatctttttaaagaaaacttaattgaatatattattgatgtgtttgtgtttgaatgcgtataggaacaaaaaatttaattgttgtctacttttatccatgttcaggattatgaaagtcatggggattttagaaatagtaaatactgtcattgtgtaccgatgcctttgttttgtatagctgcttatatatagtgtcacagaaacaactaacacagaatggtctctcattagtgaccatgcatataactttctaccaaggcattttgaaagccatattaatggtttgaagtatctttcatttacaccttaagtagatctttttcaggaaagcagattccatctaacattataaagaaagcttaaataaatgggcatatgtactgatgctcgtgttatctgttgttttaaaagcctttggaagactttatgggtaaatattatcacatagaatgagatatttttatttctctacagaaacaaaaaaggaactggtcctagaaagcaacccaaagtgggaggcactgactgaagtattaaaagaaattgaggcagaaaataaggagagtgaagctcttggtggtccaggtaggaaaaaaggagatgaaaacatttgcttccaaaatctatcaaatgagtcctgatttaattagctctttaaaagtagttcaagactagcctgaccaacatggtgaaaccctgtctctattttaaaacactgctattttatctataaaatgtagacaaataaatggcaaatgaacactgagatcctagtggcaacctcatttctgttcgtttgatgttgttttctccaggttgaatcattgtatattcatgaaagcaggtttttaaactagttgggttcttagaacttctatttaaagattgagctaatctctacacatattcaccaagctttaaatctggaatccccaaggaataaactaatgggtctcctgttttatatcctcagccaagtatctttccaaaaaagcctcaactcttctattacttcaatatgtaatgagccggtacaaactgaagacattgtctaaattggcagaggagactaacacaattcacaaaagaggaaaaatccatttggaattaatttaggcatatatgagatcctctggaaaaaaatattaattaaaaagaacttctttaaagccccaattacaccacagttgtactttcataagattaaatagtctggcttcaactttactgaaaagatttaagtaatcttgccagagaggagaaagcatttgatcaatacctaagaccctttttaaatagtttgtaaattgtggatctttaataccaaagggtaagatgtcttcccttcgggtgaaggaataagggggcacagggaaactaggaggacaagtgaggtaatagtaacataatgttgttttctattttcaggtcaagtactgatttgtgcaagtgatgaccgaacatgttcccagctgagagactatatcactcttggagcggaggccttcttattgaggctctacaggaaaacctttgagaaggatagcaaagctgaagaagtctggatgaaatttaggaaggaagacagttcaaagagaattaggaaatctcacaaaagacctaaagacccccaaaacaaagaacgggcttctaccaaagaaagaaccctcaaaaagaaaaaacggaagttgaccttaactcaaatggtaggaaaacctgaagaactggaagaggaaggagatgtcgaggaaggatatcgtcgagaaataagcagtagcccagaaagctgcccggaagaaattaagcatgaagaatttgatgtaaatttgtcatcggatgctgctttcggaatcctgaaagaacccctcactatcatccatccgcttctgggttgcagcgacccctatgctctgacaagggtactacatgaagtggagccaagatacgtggttctttatgacgcagagctaacctttgttcggcagcttgaaatttacagggcgagtaggcctgggaaacctctgaggcaagttataaagaatcacagctttcagttgcacagttctttaggatttaacccagaaactataccagttgcatgttagttttctttaatatccgttacgatgctgcttatgtttatgaaaccttattttgcttcctgatgaatctgggaagttggataggaaggatgtcaagtatcacagcagaacaacaaaccaaggggactgctcttgttctcgttacgtgctgctgtgcgttctctcctttattctttgggtattggtttgcatcgtatggggtactgtatctgaaaaagtctgggaaatgcataatattctaatttctaacaaaagttaatataactgtgactcggctaagtaattttaatcttctaaaatatctttcctataaattttaagaaatgactctaaattacatccatataaaactaaagtgttgggggaattactgtaccaggttttcttgagtttcaagatatatcagatgaaacatctacagaaatatcagatgagaaaatgatgcctcccaaagaagatagtgttctggctttccaattatctgaggggaaataaacagcaaaattaatatcctgaactcagtctgaaccaaaaacggagccaaaagaaaccttcccctagcattttaactaacacagcctttcagagtagagatgaatggaggagctggatcagaaataatgcaggatgaagagattagatgaggctggtaaaataattataggctggtaaattttttgtaccgtgctgttgatcaactttgtagatagcttatgtacaccaagcttctttcttgcctgagaacagaatagtgtggtatttgggagcaaaatgttagaatcagaagggacctgggagttcaaccacttactctatcaacgggaaactgaggcccagaaatggtgactgagttggccttggccacatgacacatccgtgggagagctgagtctcttgactcatcacccaatgatcttttctctgtttacacttcaaagaattatcatctaggaagataacagctaaaagaaaaaccaaggctcaaaaaggaaaatagctttgactgaaggtgaagcaaagggacagaggaggtgcttaattcagctctcttagcaacaaacaagatggaaaagcaggccttttttttttttcctttttttttttttctttgaggcagtgtcttgcccagatgcccagactggagtgcagtgttgcaatcatggctcactgcagcctcaacacctccccctttccctgactcacgtgattctcccacatcagccccaagtggctgggactacaggcatgtgccaccatgctcaactaattttttttttttttttgtagagatggggtctcagtatattacccaggctgatcttctgagctcaaatgatcctcccacctcagccccccaaagtgctgggattacaggtgtgagccaccgtgcccagcctaaaaaccaggacttttctaagagaaagtagatcaaattattctttgagatgcctgatgtaatccatacgtcttccatgcccatgtatttatataaaatgtgtgaccgctgtattctgttaagacatgaattaaaaaaaacgttcataggctggttttcataactactgtccaactttttaaatgattgtttggctgaggtacaaagaaagaattggagaagcctctaaaatttgtgtgtttttctgtttgtttatagttatgaggagagaattattctatccctctagttatatttcagtgtttacctaaactcgtttcttccttttggcaaaagaaaataaaaaatgccctgtgtggtaacgagacctttaacaggtggggtttaggcagcttaatttgagctagtgtgtgataaatgaaacctttgattcttagtcaaatatttattatttgagcgctctaggttgctgatttcacatgttctgctgttcctttcagggattaaaaatgctgtttttccaacctaaaagttctgtcttaacatgcagggtttactttcttatatacggaggttcaactgaggaacaacgctatctcactgctttgcggaaagaaaaggaagcttttgaaaaactcataaggtaatacatagaaaatcagtatgaaagccccaactacattggaaacctctggatgggggaatatcagatagtcctgctcaggaaggatagggcaaggaagacgttggagaggatcacattgagataaacctgtggtctgaattgtcctccagtgtagatctcagcacatacttcctttttctcttccccgtctcttccttcatctccagttgcttttcagtggtttgtttaatagaatattagaaatgtgacaaagacaactgcttttttgtttgtgaagcagtatgataaaacacgagaaatatagctaaaatactgcttttctaagaaatacattagtaaatctccctcctccctgccttatgcacaatatgtccttgggtgggtggctgctttaccgtttattgggaaatgcttttacaacacagccaattatgatcaccatcaatagaatcactctgggaaaatatttcttaggaagtgtgttgtttgtctggacatacacgtgtatgtttttaagaatgagtatctggtactattccaaatccaagtagaaaatgcccttccattttacgaaaggaaaatggtgagatgttcacaaactggttggctacctcttgccctgaaggcattcgataaatctgataaccacctaccagggatattgtcaagaagattgcagcctggtgtgggaagatgggccagataatctctaagggcctcagaagccagggcaagtgctggatggggcatcacagagctgagccagagaaagttagatcagcagagaccatggcctggacggagtgggctgggccagagcaaacttccaagcctcagacattggcaatggagggcagaaattatttttagcagtagtcaacctgcgaggactgccaagaccctaggccaaatttcaaaatggataaccattctgcagtggtggctgcgggttctcagtgtatgtgcaaaatatacatataacctggatagcccaggagaagaattcttggaaatgggggtatttgctgaatcagtggcatggagtcccacgatgggggtcagcatggtgcatgggcggtcccctcttttcccttcacatcctctcgaatggtgatatgccttggccatggattcatccagctgctagtcatacaagtattgctcagtcctctcagcctatgaaaatatgtttcctaccagtgtgctctatgggattgtttatgtcgtatatgtgggtatatatatttttcaaaaacctagttcagaaatcgtgttataacagaccaggcattataccagccgcctcttgttccaggctctttgctcctctctgtcttactctttgtctgctagaccttcacgccacaaggctcaaagagtaaacaggtatttattaagcatctggtatgtgccaggccctgtgctaatattaaagtgctgaggttacaagtggtgcagaaaaagcctctgccctcctggaacttaccctttagtggaaaagacagacattaaattattataaatattgtaataagtagaggtatacagagcaccgctggctgcaaaggtaaaagaagagggtgtaataggagagtacatcaaagacctcacccagaccacaagctgatcgggagccgcttccctgaggaaatgatattcaagctgatactaggcagatggggtggaaagggggttatgttgaacaaaggcgtgcacgaaggctcccaggtacaagaggccctgtaaaggatttagggcttcacgggcagtaagaccgcactgaagcattctaagtaggaaagggacttaggtatgtttgtaaaggctttctctggcatcaagctgaggagtgagtgagggtggaaaccagtcagaatgctagtgcagtctgatgggagaaggtggtagccaagattaggttaatggaggaaagaagacagatttgagagagatttgggagatagaatcaaagaattggtgatactggatgtgggccagtacctcctgaccattccttcactctttttagaacagcctttgcccaagttttcgctcattaaaataattgtcacctagatagaaatgagtgcacagagctaaaatactcagattgggttttcagtgttcatgtcagggttccccaagatcatcctcaggctcgatgattcactagaactcacatgagtcagaaaaggtgttatactcacaatacagtttcttccagcaaaaggatacagattaagactggatgcagtggctcacgcctgtaatcccagcacttttgggaggccaaggcgggcagatcacttgaagtcaggagttcacgaccagcctggccaacatggtgaaaccctgcctctactaaaaatgcaaaaattagccaggagtggtggcgcatgcctgtaatcccagctacccgggaggctaaggtgggagaatcactcaaaccccaggaggtggaggttgcagtgagcttagatcgtgccactgcactccagcctgggcaaccgagtgacccccgtctcaaaaaaaaaaaagaaaaaaaagattaaaatcagcaaagggaaaaggcacatggggcaaagtccaggtaaaaccaggcctaagcttccaggtgtcctctcccagtggagtcacatggatgtgctgagtcctcccagcaacagtgtgtgaccacacatgcaaagtgttgtcaacagggaaactcacctgagccttgagtccccacatttttactgagctgagtcacatagacacagagtacctccatggctggctacagctcctcagactccagcccccaaagcagcaacagacatttacgataaatcacatcgtcagcataaactatctgatccagctggcacattgtgacccaaggcctcaggcatataaaaaccttatcagggagaatactccaggggctcagagctcatctcccaggagctgaccaagagccagtgttgaggagagaagcctttcttggaaacatgcagagtttgagcagcccaggcctgctgagttaatcctttcctgcacagcgttagagccagaggagcctgatagaatgggaggaagacagcacctgagtaggtgagtttcttgcttcgcctgtcttcatgcagctgcctcttctccagtgcatcagggaatctaatctagaaaagagcacttttagtagatagtagtaaggtaccagatcccatgccattcctgatttatgcacctgcttctacacatcaaaggactcagtgacaagatgtggattagccttatacatactggaaaacctcactcagcagaacctggatcatggactctctcccacatttcaatccatagaaaaatttctgcaccaggttttaacataattttatctgttatctggcataatttttaatgctttcaatgatgattgtctacttgtcataaataagatcttcccattttacccagcagtcaatcagatagttgcactgttaagaatcttaagatacttactttcccaggaaacttgggaaatttgagaggtgcttcttttgcaaagcaaaaacatatttgaggtgcattgttcaaaaaacatttgcactgtgtacttaagagaaaaatttaatatgaagatgagacaatgtgcttttaccaagacctccatgggtgatgttgtaagaacaaaagcagttgtggctctttaaccagaaaggaacaaatcaggtgaactgacagtgaaaggattgtttagctggattaaagatctgtagattatagataacagataaagtggaaaagattacactgctaaatatcataataattttatttctacccagggacgtaaaatgctccctgggtagaaaacttagtaataacatcctcagtatacatagctttgaggaggtcactgcttttcaaaggaaagggtaagattatttgaaattttactttttgaaaatacgatcacaaaatgggctagcatgagggcttaagtaaatgcccattggaagagacttctagttcagtgctactttcctatgttgccataggattatgttgtacacggtattcaaataacattgaagactgggtgcagtggctcacgcctgtaatcccagcaccttggaaggccaaggcgagaggatcacttgagcccaggagctcaagaccaccatgggcaacatgtgagaatccatctcaatttgtttaaaaattaaaataaaataaattttaataaaaataccattgaagatactaaagcaaacataggaaagcttggtgctttaagcagaaataggaatctgaattttttaattgttttgtgtctgtcacataggggaacttggataattatgccacatgttgaaagcaagagactggctgtttataattacgatacatttctgttaaactgaattactgcttaggaaggcttattttcttcatagtccaggtttcatctcgaatatattttttctcacattcgacttgtagttaagttataacatttagtggtaaactagctgttttctgtagctattaatggaaacaattgtggaattatttgaaagcaaatcttcagttttttagtataatcatggataattagacgaagagattaccacgttataagaaaagtacagtaataataacacctaacatttatatagtgcttactaggtgccaggcactgttctgagcgccttgcatatgttatgtaatcctcataacagtcttttgaggtaagtttttaaattattatcctcattttaccaataaagaagttgaagtacagagccatgaaatgacttgcctaaggtcacgtggccagtaaatggtttcagatccacacactttggaaccggaatctgtactctaaccccctaagattatacagactacaaattaatcaggaaattgggatgatcccatgtgtgatatacagcttagccagtgtaacaagtagaaacaaagtgggggacacaacataataataccaaatgaatgttaaggaaaaatagaagagcagtaatttttttgaatggtctgccctttgtcctaaccagagtgcaatagagagaatggagtggtaatgagtggcagccagagccattgccattgcagagggcttttcagcaggtagcgcttgagtctggtattgagaataatgagaaaaacatggaactgaaaccattgtctgcccccttgtgatctacttataaaatttgtactaataatatatttgcatttataggttgtttcaaatagtataaaattttaaattacaatttctgttctttagtagtatcttctagtgataccctgctctaaaatatttatccagagtggttgaagaattgaaccctctgatttcatttcctctaatgggtgtattagtccattttcatattgctatgaagaaataccccagacttggtaatttataaagaaaagaggtttagttgattcacaagtttcacatggctggggaggccttgggaaacttacaatcatggcagaaggggaagcaaacttgtccttcttcacatggcagcaggagagagaatgagtgccagcaggacaaatgccagacacttctaaaaccatcagatctcgtgagaactcactcactatcatgagaataacatgggggaaaccacccccatgactcaatcacttcccaccaggtcccttccaggacacatggggattatcggaactattaattcaagatgagatttgcgtggggacccagccagaccatatcaatgggaaaatcttggttgttttaacccttgttgaaattaattaacattgatggttcctcttctgttcccctcaccttagtctgttttatcgcagttcctcagttccagttgtttttttttttcttctcatgtttgctttgttccctcgacatcagttgtgaacccaagcagggaagagactcagcttatatatcttttctgtcatacctggcagaattaattataacatactttatcaattttgaaaaataaggctaccgcaaacctggcttactctttctgtgattattgaggatcttgtcatgatgtagttccaaattgcgaatcttagttatgattgtactgtcctctagatctaccgtataagatatgagccaccttgaagacaggaattcttgcgtgatcacgattatatccaaagtacctagagcaccacgcaggaacactccataaatgtttttcaataaatgcatgagtgagtaatgaatgctgctcccaaggcataacctgagctgttgattttttgttttaatctctgatagaaatttgatttcttatatctatttcaaaatcttgatcttgattttcctttaaaactcagggtgtttaatgggacctcccacctggagtttttaacatcaaaattctatcatatatgttttttagtttcttaatgatttttaaccacccctatttgtgattaccctgaaaatgtttgaatataaatgatttacatttacactttaaccttacaaacagtctcaagaatctcttggtggcattttttacatgtggcattttttgacatgcttgtgttgtttcttaaatatttgaatataaagtcaaaataaacaactgctttttttactctggaaaatcaagaagtagtatccgaccaaggcactttttactgactttttctacttcctttacccatcatttgtcttggcatatttacttctaatatattccttgtttttgtttttgtttttctcttactgctatcatcatgtagatcattttcaatactacaatttacacacaataaaatctagaattttgaaatttgtttcagaagtgttgacaatgttttctcccacagggaaaaagcaagcatggttgtccctgaagaaagagaaggcagagatgaaacaaacttagacctagtaagaggcacagcatctgcagatgtttccactgacactcggaaagccggtgagtcctgcactttgtcaggcacctccattgcctgcaaagggggctgtgaagttccagagttactctgccaaggcttggtctgtattaacaaactcttaaaaatgggggttgggccaaggagaggatgtgtacttccctactctaatctcagctctgccattcactaaccatgtgtcctccccagagtgaaggcactgtgtcatctgcgaatcatgtgaggttgagttttaggcaccccagcttagaatgggttatgttccagcatttcctttatatttggttggttgagactcagaatgtacttttgcaaataaactttgttaaacggtgattaggttcttatctcaacctaaaaagccagtttaactcagagtagttaaaggaagtttctccttccctcctctgcctctccccttagttgtatacataggtggggtgcatacactcctcctctccttctgtattcatttcttcttggtagctccccagatacctggtgtctggtacgcattgctgtgcagtgtccaaactgtggcatgccaccaagacctgctgaattccaagtgcactgtgatccagaagtcaccattttcccattccccaaattcctattttcctatgccagcagctgatttcagccaggtggcatgagaaaagcaatacgattgagttggtttaaccttcggtgaggccaagtacagttgaagcagtgggtgtcagaatttagtagactttagaataacctcagatgctcattaaaactgtagattcataaccctcaattcatagaaattccaactcagtggatgtgaaatggagccagcagctcgggggcttctgatggaagtggtttttggaccatactttgggaaacattgcctcagagcctctgtgtcttgttcaaagaagattctttgaaatatcaaccaggttgttgacatttcatgaagaacgacagaatgtaaggcagtatgggtaccacacagagagctgttcgtagaagtctttccttagagatcagttctccacgccttcatattagttgcctatggctgctataacgaattaccccagacttagtggctcaaaacagcacacattttattatgttacagttctgcaggttcaaagtccaaatgggtttcacaaggctaaaatcaagatatcggcatggctgcattcctcctggaggctctaggggagaatccctttcctggccttttccagcctctagaggccacctgatttccttagcttatagccccttcctccatcttcatagccagtagcatagcatcctcccttctctgatcatcctgcctccatctttcacttctgagaatccttcagcctacctagataagccagataatctcccaatctcaaaatgcttaacggagatacattctgagaaatgtgtcattaggcgatttcatcattacatgaacatcacagaacgtgcttacacaaagctagacggtctagcctgctgcacagctaggctatgtggtatggcctatggctcctgggccacaaacctgcacagcatgttactgtactgaatactctaggcaactgtaacacaatggtaagtatttgtgtatgtaaacacatctaaacatagaaaggtacaaaaatacagtattgtgatcttacgggatcactgtcttatatgcactttgtcattgaccaaaacgttgttgtacagcacatgaccgtattaataggttgcagggatttggatgtggacatctttgcggggtaccattattctgcctacagcagcccttgatacttaaaaatgtgatccttaaacaagcagcattagcatcacctggcattttgttatgaatgcagattcttagaccccttagatctcagacctactaaatacaacatctgtttttttgtttgtttgtttgtttgtttgtttgtttttgagacggagtttcacccttgttgtccaggctggagtgcactggtgcagtctcggctaactgcaacctccacctcctgggctcaagcaattctcctgccacagcctcccgagtagctgggattacaggtgcacgccaccacacccggctaattttttgtattttttgtagagacggggtttcaccatgttagccaggatggtctcaaactcctttcctcaggtgatccgtccacctcggcctcccaaagtgctgggatcacaggcgtgagccaccgcgcccggcccgaatctgctttttaatgtgaccccaggtggctcatgtgcatgttataatgtgagaagctgtggtctaagatgttcatgtttttcccagctccttccctttccccatctctggactcactgatataaatacaatagtccctaaatcactagatttgctcagtgagcatttttaacatctactggggccgctattttaagcctctaccctcaggctttgtcctaggaattgggaatacattgaccaacaaaatgtggtcagtgaggaaactacagaggggagaccttagcaggtatgtgtggatttatgaatcatcgcaagtaaggaactactgacagtctaactttcctattagctcggtttccttcaagggaaattgcctctactttataaacaaatctttttgaaaatatagaaattatatggaatattaccatatagaattatgtaaccatccatcagagttaacaacagaaacatcgatttttagattttgttatattccttctttgagagttcttccccagtgacattacttactttttctctgtaggtggccaggaacagaatggtacacagcaaagcatagttgtggatatgcgtgaatttcgaagtgagcttccatctctgatccatcgtcggggcattgacattgaacccgtgactttagaggttggagattacatcctcactccagaaatgtgcgtggagcgcaagagtatcagtgatttaatcggctctttaaataacggccgcctctacagccagtgcatctccatgtcccgctactacaagcgtcccgtgcttctgattgagtttgaccctagcaagcctttctctctcacttcccgaggtgccttgtttcaggagatctccagcaatgacattagttccaaactcactcttcttacacttcacttccccagactacggattctctggtgcccctctcctcatgcaacggcggagttgtttgaggagctgaaacaaagcaagccacagcctgatgcggcgacagcactggccattacagcagattctgaaacccttcccgagtcagagaagtataatcctggtccccaagacttcttgttaaaaatgccaggggtgaatgccaaaaactgccgctccttgatgcaccacgttaagaacatcgcagaattagcagccctgtcacaagacgagctcacgagtattctggggaatgctgcaaatgccaaacagctttatgatttcattcacacctcttttgcagaagtcgtatcaaaaggaaaagggaaaaagtgaacagtgatggctgttttcttatcccatgcctgtacttttcagcggctccttgccagacatcataggtcattattaattattggtttgctatttcattcttttccaatgctcttaatgattgtacggtggaccagaagccaggattcctctctgaactctgcagttaggcatcacttgaacttgcctgtgcctgctctttttcctccctgcaccgtctatgccgggcttagcatgtttctttttaaatgaggtttgtcaggatcaggtaaagttcctacaagtgattacagaaggtagaaactttacctgatcctaacagatctcatttagaaaggaatatgctaagcctggcatggacggtgcagggagggaaaagagcaggcacaagaaagctaccatttttaacagtccttgttatctagtgcaacataaataacagtcttaattgcacttatacccatgtcctgtggctctccaaatctggtctttgctgttgtgtctgctggacgcttgaactgatgtttgtgtaggaaatcatgttctgaccctttgtctacaaaggagccttctggaacactgagaagaaacatctctttgccattcctgaccagttctctctaccacattttcttcagctccatacttctgcctgtctgctctaaggaaatttcatggagccttcctactactaattcaagacagtctcctcaaaaactggttgactagtcttctaatgaccctaacatatgtagcatatactataatttcattgttccaaattagtatttttaaagcaaaatgaattacctgtttgcaaaagttaatgatgaaggagctcttagaattctcaatttttgcacatattcagtctcctaatatcagagatccctaagtccagctggctagttacagagttttttcagacttcctcgtttctcagctcttatatcctaagacaccagcatcatatcctctagaaatacaacctaattggcagtgagccgagatcgcaccactgcacccctgcctgggcgacagagtgagactttgtctctattacaaaaagaaaagaaaagaaatacaacctaagctcacctgcctgtgattcctcatttctcaccatcctgtgccagggtggctacttctctctgtgaggactcaaatacaagccaatgagtggcccactaagcttttaagatttgattttcctgccttgagataaaaaggagtgtaggtaaatgaaagatcaatgtatggaatatataaaaatacgaaagaaatatatacgtttaaaaatccataaagaaaaaaatctcattctaaacctgattaagttggctttttacgtaagtgtacaaataggatattcacagcatctttgtgcagtttttaaacttttatatttaaacattattaagttggcttttgttcacatgttgagtaatgggtagtaaattttctatatcagctcctggcgacagagcgagactccatctcaaaaaaaaaaaaaagtgacagtagtggaataaaattctaggtcttgtccaccagctcagcattcttttaatcacaccatgcttttctacaccctgcagtttcttcttagttgttcctatagcactcagttccttacttaaaaaaaaatggaaaatgctgaagaaggaaaaggcacaggatccaacagaatatggcaacttggaagatgacaacagtcagcagcaccagggagcaaaatggaaataattttgtttctttccttagaacattaactgtgggctttccaaaatttgtccttcaacttcatttctactttagacaggctctatttgaggtccatctcatcccctttcttcccattcccctccaaatactgctgcattaaccttgccttttcctttcacttcttcctctaatcctaaacttgatcattccctaaaaatctttttataatcccaatagtctttagaactagaactactcatctctgcatttgttcccaactttctcaaaagctcagtcccaaaatgctgcctcatattttttcatctttcatcactcctcaaccacatgtaatatgccccctgccccagtatttcataattgccctcaataagcccctccaattgcctggattccccagcaagcactttctaaataatactggtctcttcccaactaaaaaaataatactcatctgttgctatagactgaatgtttgtcctccccacaaattcatattctgaagtcctaacccctgatgtgattgtatcaggaggttgagctatggcagaaccctcatgaatgggattaatgcccttaaaaaagagcccagagagctccctttcttgccaccatgtgaggatacagtgagaagacagctgtctattagccgggaagcaggcccttgccagacagaacctgcctgaaccttgatcttggactagaactgtatgaaataaatttctgttgtttataagccatccaatctatggcagtctgttattgtagcccaaactgactaagacatctatactatcagatgtctagtcatcctctccagaagtctattcctgctttgctgcactctcaccaacattgaatataatttaattattctcaatatgataggtgaaatatctctcgttttcactttcctctcttgcagtgaggatggccatttgacacagttacagcaaatgagtcttaaacaggtatcactgactgggcttctgaagatttttaaaaagaaagtcaacactgctgccatgggcctcatgccctttgccctcccttctgcctgcctagagcctgtttgattcctcatcccaattaacccacacacactgactacattaatgtttctatcaccagctaggatcatgatgggtttcctggaaaagtcaaagacttcaggacagtcagctgtctacagaataaaatacagggtcctttgattaagacctcacaatatcacttttttccctatatttgtcaaggccattatacggcaaactccatttccaaaacatgccttctttggtcagatatcgtctgatagaatgatcaaaaggaataaaaacctacagaaaccatctaagaaaaatgaagactcactgaaaaaattcaagagaatctcacagaccctaaatataagaaataacggggggcctcggggggaatgagaagtcatttggcagctactctgctggcaccaattggagccctgctccttcaagtgtggtctggtaaccagaagtactggcatcgccacatcaccagggaacttcatagaaatgcagactccacacttactgcatatctgtaagacctcaggattcctttacacattcacatttaagaagcaaaaattaagagcacttcctcccttccacattaccttccctgtgtacagctgtattccccaaaaccaaaataaaaatactgaactgagcacacattataagctaggtatttgatatgtgttatctcatttaaacctcaacccacaagatagtactattacctccttttattattaacccattttcagagatgagaacactcaaataacctactcaaagtcacgcaaattaggaagcagcacagttgggactggacctcagaaaagtctcctctaaagactgtgcttttaagcacttctatctgtgtgaaaaggctgttaattctgtatcctccacactatgtgaataatgcttagaaatggcaaggaacccccaaactactgagtcccttaattttgtctgagaaaggcaggattccaaaattagcattgaagagtcagaatgaagggtttgaaaaaagatctgttcttggaattagacacaacaaactttgaagacagaaagataaggactacctatctctatgaatcatcaaaatttactcaaacttcactctgtatgactggccaataaacacagtatgtttatatgttgctaaagctggctttatgcctaaagtgctaaattccaacagagtgggaaatatgtacctcccttaccagtctggaggccctggaggcctgttcctgcagccagtggagatgagccccccagctcacttcctccctccagttgtgagatcacagcaggtttgagaagtggaaatcctggtttgggagaggtaaataggagagacagatgaataaactcccacagacaaattcctaagcctcttctcagactgtctcagcaatggggagggaaggtaagaaccccaggaggtcccaagcctcaggactacgggaaagtactgtggggcttaggaaggactaaagagaccttggagacttccaagggctttgggaggcaaatgtgggggttgggggtgaaggcttgggaacgtgtgggagagcctggttagggcccagactgtaggcctaggagacctcatgcagggcaagcagggagattctgcccaaagggataccactttttgaccttggcctgaaataatccagagtacactgagatccttgaaaagactcaagacaggtaagatgagggggcaactgaagatgccactgtggaacaggaagcaactggattccagtgtttccaaaacatagctttcatgggttggatcaacagtgcataccagttccaagcaaagtcctatataggcctacaaaaggcttggcatttgcccctgccagtaacctctaagtctagattaggaacagctctggggttctcactcagtaaaggattaccagagatcccctcagtaacctgtaagggagaagcaagccaggaaccccaattggcagattccaggttcccagggtagagaggtcttacccagggaggccacattcccataattctccagcatcacatccctgtacagggtcctctgtgcaggggacaggccatcccattccgcctgggtgaagtacacagccacgtcctcaaaggtcaccgacttctgaaacaataggttcctgctgccctagggccaattccatagctcaggccctaagtgaggggcagagcgcagtataagggcttggggagggtgcttgtgagagcacaaaattagtattaacaacaaggggaagatctcagaaaaaaaatatcgagaaagtaaactacaaagtatccacattctcccacagcagggaaacctcatgccatttttcacacaaataagaggtcacattaagacaggctgaaagaaaaaaatttccataagcaaattctctaaagccaactccactcttttagataagctgctccctcccagcaaactcggggctgatccaccagcaggtcccacaccactcccctgcgcctaacctcagccctgttctgctgcccaccccctgaactcccatttcagtggatc

SEQ ID NO: 2766 - DNA, 847 bp, Homo sapiens
agtggcttcctaacagcagaagaactaacaatccactgaataaagaaaaagaatgggctcgatggaggaataagaagctagttatagtcatcggtagaattgtgaaaggcgcaatttgattggttaaaattgttctttgacgagccaaccaattagaaaggaaataaggtgaaggctattttacatgtatgcgtcactgacacattgcccaatcagagctggatattttgaattctttatttgcatgaaaggcctataaaaggagagactctagacacgagcttttatttaagtgcgttcattctcactgctgttattgttttctgacagcatgcctgaaccagctaagtcagctcctgctccgaagaagggttccaagaaggctgtgaccaaggcgcagaagaaggatggcaagaagcgcaagcgcagtcgtaaggagagctactccgtgtatgtgtacaaggtgctaaaacaggttcaccccgatactggcatctcatccaaggccatgggcatcatgaattccttcgttaacgacatcttcgaacgcatcgcaggcgaggcttcccgtctggcccactacaacaagcgctcgaccattacctccagggagatccagaccgccgtgcgtctgctgcttcccggagagctggccaagcacgcagtgtccgaaggtaccaaggctgtcaccaagtatacaagctccaagtaaatgtgtgcttaggtgctttaaaactcaaaggctcttttcagagccactcaagtctcacataaagagctttaatattgaatttcaccgttttctagggaataagggaatttttcgattttgtaatcccagcacttt

SEQ ID NO: 2767 - DNA, 2235 bp, Homo sapiens
atggctgtgctgcctggccctctgcagctgctgggagtgctgcttaccatttccctgagttccatcaggctcattcaggctggtgcctactatgggatcaagccgctgccacctcaaattcctcctcagatgccaccacaaattccacaataccagcccctgggtcagcaagtacctcacatgcctttggccaaagatggcctcgccatgggcaaggagatgccccacttgcagtatggcaaagagtatccacacctaccccaatatatgaaggaaattcaaccggcgccaagaatgggcaaggaagccgttcccaagaaaggcaaagaaataccattagccagtttacgaggggaacaaggtccccgtggagagcctggcccaagaggaccacctgggccccctggtttaccaggtcatgggatacctggaattaaaggaaaaccagggccacagggatatccaggagttggaaagccaggtatgcctggaatgccagggaagccaggagccatgggcatgcctggggcaaaaggagaaattggacagaaaggggaaattgggcctatggggatcccaggaccacaaggacctccagggcctcatggacttcctggcattgggaagccaggtgggccagggttaccagggcaaccaggaccaaagggtgatcgaggacccaaaggactaccaggacctcaaggccttcggggtcctaaaggagacaagggcttcgggatgccaggtgcgccaggtgtaaaggggcctccagggatgcacggcctccccggccctgttggactgccaggagtgggcaaaccaggagtgacaggcttccctgggccccagggccccctgggaaagccaggggctccaggagaacccggtcgacaaggccctattggggtaccgggggttcaaggacctcctgggatacccggaattggaaagccaggccaggatgggatcccaggccagccaggatttccaggtggcaaaggggagcaaggactgccagggctaccaggggccccaggccttccagggattgggaaaccaggcttcccaggacccaaaggtgaccggggcatgggaggtgttcctggggctcttggaccaagaggggagaaaggaccaataggttccccaggaatagggggttctccaggagagccaggcctgcctggaatcccaggtcctatgggccctccaggtgctattggttttcctggacccaaaggagaaggtgggattgtagggccacaggggccaccaggtcccaagggtgagccagggcttcaaggcttcccaggaaagccaggtttccttggtgaagtagggcctcctggcatgaggggtttcccaggtcccataggccccaagggggaacatgggcaaaaaggtgtaccaggactccctggtgttccagggcttctcggacctaagggagaaccaggaatcccaggggatcagggtttacagggccccccaggtatcccagggattgggggccctagtggccccattggaccacctgggattccaggccccaaaggggagcctggcctcccagggccccctgggttccctggtatagggaaacccggagtggcaggacttcatggccccccagggaagcctggtgcccttggtcctcaaggccagcctggccttccaggacccccaggccctccaggacctccaggacccccagctgtgatgccccctacaccaccaccccagggagagtatctgccagatatggggctgggaattgatggcgtgaaacccccccatgctacgggggctaagaaaggcaagaatggagggccagcctatgagatgcctgcatttaccgccgagctaaccgcaccctttccaccggtggggggcccagtgaagtttaacaaactgctgtataacggcagacagaactacaacccgcagacaggcatcttcacctgtgaggtccctggtgtctactactttgcataccacgttcactgcaagggggggaacgtgtgggttgctctattcaagaacaacgagcccgtgatgtacacgtacgacgagtacaaaaagggcttcctggaccaggcatctgggagtgcagtgctgctgctcaggcccggagaccgggtgttcctccagatgccctcagaacaggctgcaggactgtatgccgggcagtatgtccactcctccttttcaggatatttattgtatcccatgtaa

SEQ ID NO: 2768 - DNA, 2846 bp, Homo sapiens; identical to SEQ ID NO: 2762

SEQ ID NO: 2769 - DNA, 2212 bp, Homo sapiens
tgccggctgctcctcgaccaggcctccttctcaacctcagcccgcggcgccgacccttccggcaccctcccgccccgtctcgtactgtcgccgtcaccgccgcggctccggccctggccccgatggctctgtgcaacggagactccaagctggagaatgctggaggagaccttaaggatggccaccaccactatgaaggagctgttgtcattctggatgctggtgctcagtacgggaaagtcatagaccgaagagtgagggaactgttcgtgcagtctgaaattttccccttggaaacaccagcatttgctataaaggaacaaggattccgtgctattatcatctctggaggacctaattctgtgtatgctgaagatgctccctggtttgatccagcaatattcactattggcaagcctgttcttggaatttgctatggtatgcagatgatgaataaggtatttggaggtactgtgcacaaaaaaagtgtcagagaagatggagttttcaacattagtgtggataatacatgttcattattcaggggccttcagaaggaagaagttgttttgcttacacatggagatagtgtagacaaagtagctgatggattcaaggttgtggcacgttctggaaacatagtagcaggcatagcaaatgaatctaaaaagttatatggagcacagttccaccctgaagttggccttacagaaaatggaaaagtaatactgaagaatttcctttatgatatagctggatgcagtggaaccttcaccgtgcagaacagagaacttgagtgtattcgagagatcaaagagagagtaggcacgtcaaaagttttggttttactcagtggtggagtagactcaacagtttgtacagctttgctaaatcgtgctttgaaccaagaacaagtcattgctgtgcacattgataatggctttatgagaaaacgagaaagccagtctgttgaagaggccctcaaaaagcttggaattcaggtcaaagtgataaatgctgctcattctttctacaatggaacaacaaccctaccaatatcagatgaagatagaaccccacggaaaagaattagcaaaacgttaaatatgaccacaagtcctgaagagaaaagaaaaatcattggggatacttttgttaagattgccaatgaagtaattggagaaatgaacttgaaaccagaggaggttttccttgcccaaggtactttacggcctgatctaattgaaagtgcatcccttgttgcaagtggcaaagctgaactcatcaaaacccatcacaatgacacagagctcatcagaaagttgagagaggagggaaaagtaatagaacctctgaaagattttcataaagatgaagtgagaattttgggcagagaacttggacttccagaagagttagtttccaggcatccatttccaggtcctggcctggcaatcagagtaatatgtgctgaagaaccttatatttgtaaggactttcctgaaaccaacaatattttgaaaatagtagctgatttttctgcaagtgttaaaaagccacataccctattacagagagtcaaagcctgcacaacagaagaggatcaggagaagctgatgcaaattaccagtctgcattcactgaatgccttcttgctgccaattaaaactgtaggtgtgcagggtgactgtcgttcctacagttacgtgtgtggaatctccagtaaagatgaacctgactgggaatcacttatttttctggctaggcttatacctcgcatgtgtcacaacgttaacagagttgtttatatatttggcccaccagttaaagaacctcctacagatgttactcccactttcttgacaacaggggtgctcagtactttacgccaagctgattttgaggcccataacattctcagggagtctgggtatgctgggaaaatcagccagatgccggtgattttgacaccattacattttgatcgggacccacttcaaaagcagccttcatgccagagatctgtggttattcgaacctttattactagtgacttcatgactggtatacctgcaacacctggcaatgagatccctgtagaggtggtattaaagatggtcactgagattaagaagattcctggtatttctcgaattatgtatgacttaacatcaaagcccccaggaactactgagtgggagtaataaacttc

SEQ ID NO: 2770 - DNA, 321 bp, Homo sapiens
tgaattttctgactcttcctttcagacccccccaagacacacgtgacccaccaccctgtctttgactatgaggccaccctgaggtgctgggccctgggcttctaccctgcggagatcatactgacctggcagcgggatggggaggaccagacccaggacgtggagctcgtggagaccaggcctgcaggggatggaaccttccagaagtgggcagctgtggtggtgccttctggagaggagcagagatacacgtgccatgtgcagcatgaggggctgccggagcccctcatgctgagatggagtaaggagggagatggaggc

SEQ ID NO: 2771 - DNA, 930 bp, Homo sapiens
attttttaaattattaggtgtgggcagaagaaaaagctagtgatcaacagtggcaatggagctgtggaggacagaaagccaagtggactcaacggagaggccagcaagtctcaggaaatggtgcatttggtgaacaaggagtcgtcagaaactccagaccagtttatgacagctgatgagacaaggaacctgcagaatgtggacatgaagattggggtgtaacacctacaccattatcttggaaagaaacaaccgttggaaacataaccattacagggagctgggacacttaacagatgcaatgtgctactgattgtttcattgcgaatcttttttagcataaaattttctactctttttgttttttgtgttttgttctttaaagtcaggtccaatttgtaaaaacagcattgctttctgaaattagggcccaattaataatcagcaagaatttgatcgttccagttcccacttggaggcctttcatccctcgggtgtgctatggatggcttctaacaaaaactacacatatgtattcctgatcgccaacctttcccccaccagctaaggacatttcccagggttaatagggcctggtccctgggaggaaatttgaatgggtccattttgcccttccatagcctaatccctgggcattgttttccactgaggttgggggttggggtgtactagttacatatcttcaacagaccccctctagaaatttttcagatgcttctgggagacacccaaagggtgaagctatttatctgtagtaaactatttatctgtgtttttgaaatattaaaccctggatcagtcctttgatcagtataattttttaaagttactttgtcagaggcacaaaagggtttaaactgattcataataaatatctgtacttcttcgatcttcaccttttgtgctgtg

SEQ ID NO: 2772 - DNA, 2627 bp, Homo sapiens
ctctaaaggccgcgggccggcggctgaggccaccccggcggcggctggagagcgaggaggagcgggtggccccgcgctgcgcccgccctcgcctcacctggcgcaggtggacacctgccgaggtgtgtgccctccggcccctgaagcatggccagcagcggcatggctgacagcgccaaccacctgcccttctttttcggcaacatcacccgggaggaggcagaagattacctggtccaggggggcatgagtgatgggctttatttgctgcgccagagccgcaactacctgggtggcttcgccctgtccgtggcccacgggaggaaggcacaccactacaccatcgagcgggagctgaatggcacctacgccatcgccggtggcaggacccatgccagccccgccgacctctgccactaccactcccaggagtctgatggcctggtctgcctcctcaagaagcccttcaaccggccccaaggggtgcagcccaagactgggccctttgaggatttgaaggaaaacctcatcagggaatatgtgaagcagacatggaacctgcagggtcaggctctggagcaggccatcatcagtcagaagcctcagctggagaagctgatcgctaccacagcccatgaaaaaatgccttggttccatggaaaaatctctcgggaagaatctgagcaaattgtcctgataggatcaaagacaaatggaaagttcctgatccgagccagagacaacaacggctcctacgccctgtgcctgctgcacgaagggaaggtgctgcactatcgcatcgacaaagacaagacagggaagctctccatccccgagggaaagaagttcgacacgctctggcagctagtcgagcattattcttataaagcagatggtttgttaagagttcttactgtcccatgtcaaaaaatcggcacacagggaaatgttaattttggaggccgtccacaacttccaggttcccatcctgcgacttggtcagcgggtggaataatctcaagaatcaaatcatactccttcccaaagcctggccacagaaagtcctcccctgcccaagggaaccggcaagagagtactgtgtcattcaatccgtatgagccagaacttgcaccctgggctgcagacaaaggcccccagagagaagccctacccatggacacagaggtgtacgagagcccctacgcggaccccgaggagatcaggcccaaggaggtttacctggaccgaaagctgctgacgctggaagacaaagaactgggctctggtaattttggaactgtgaaaaagggctactaccaaatgaaaaaagttgtgaaaaccgtggctgtgaaaatactgaaaaacgaggccaatgaccccgctcttaaagatgagttattagcagaagcaaatgtcatgcagcagctggacaacccgtacatcgtgcggatgatcgggatatgcgaggccgagtcctggatgctggttatggagatggcagaacttggtcccctcaataagtatttgcagcagaacagacatgtcaaggataagaacatcatagaactggttcatcaggtttccatgggcatgaagtacttggaggagagcaattttgtgcacagagatctggctgcaagaaatgtgttgctagttacccaacattacgccaagatcagtgatttcggactttccaaagcactgcgtgctgatgaaaactactacaaggcccagacccatggaaagtggcctgtcaagtggtacgctccggaatgcatcaactactacaagttctccagcaaaagcgatgtctggagctttggagtgttgatgtgggaagcattctcctatgggcagaagccatatcgagggatgaaaggaagtgaagtcaccgctatgttagagaaaggagagcggatggggtgccctgcagggtgtccaagagagatgtacgatctcatgaatctgtgctggacatacgatgtggaaaacaggcccggattcgcagcagtggaactgcggctgcgcaattactactatgacgtggtgaactaaccgctcccgcacctgtcggtggctgcctttgatcacaggagcaatcacaggaaaatgtatccagaggaattgattgtcagccacctccctctgccagtcgggagagccaggcttggatggaacatgcccacaacttgtcacccaaagcctgtcccaggactcaccctccacaaagcaaaggcagtcccgggagaaaagacggatggcaggatccaaggggctagctggatttgtttgttttcttgtctgtgtgattttcatacaggttatttttacgatctgtttccaaatccctttcatgtctttccacttctctgggtcccggggtgcatttgttactcatcgggcccagggacattgcagagtggcctagagcactctcaccccaagcggccttttccaaatgcccaaggatgccttagcatgtgactcctgaaggaaggcaaaggcagaggaatttggctgcttctacggccatgagactgatccctggccactgaaaagctttcctgacaataaaaatgttttgaggctttaaaaagaaaaaaaaaaaaaaaaaaaaaaaaaaaaaa

SEQ ID NO: 2773 - DNA, 1515 bp, Homo sapiens
ttttttttttttttcatcaggtcagagccaaaggaaagcttgaaaaatgaagacattagcaggacttgttctgggacttgtcatcttggatgctgctgtgactgccccaactctagagtccatcaactatgactcagaaacctatgatgccaccttagaagacctggataatttgtacaactatgaaaacatacctgttgataaagttgagattgaaatagccacagtaatgccttcagggaacagagagctcctcactccacccccacagcctgagaaggcccaggaagaggaagaggaggaggaatctactcccaggctgattgatggctcttctccccaggagcctgaattcacaggggttctggggccacacacaaatgaagactttccaacctgtctttggtgtacttgtataagtaccaccgtgtactgtgatgaccatgaacttgatgctattcctccgctgccaaagaacaccgcttatttctattcccgctttaacagaattaaaaagatcaacaaaaatgactttgcaagcctaagtgatttaaaaaggattgatctgacatcaaatttaatatctgagattgatgaagatgcattccgaaaactgcctcaacttcgagagcttgtcctgcgtgacaacaaaataaggcagctcccagaattgccaaccacttcgacatttattgatattagcaacaatagacttggaaggaaagggataaagcaagaagcatttaaagacatgtatgatctccatcatctgtacctcactgataacaacttggaccacatccctctgccactcccagaaaatctacgagcccttcacctccagaataacaacattctggaaatgcacgaagatacgttctgcaatggtaaaaatttgacttatattcgtaaggcactagaggacattcgattggatggaaaccctattaatctcagcaaaactccacaagcatacatgtgtctacctcgtctgcctgttgggagccttgtctaatttcagataatggttagcattacgatggctactataaataaaccattcttactgctctcttccaaaacaaaactcagcatgatactttgagattgtgttctgagagatgatatgactacataaaatacaattaaaaatgttataatataatgaaaatgtagtaatttaagaaaacaccagatgagttaggaataaacctataacatttacaaaaagagcaaaactaagtgatagaaaatatttcacacatgttcttatagatcatgtatcacttgcaagttttaggagttcatatcctatatcatttcaaattaagtacataataaagtaaaattttgaaatgaacactttaggtatttttgccaagatttagatgtttttaattaaacttttctcttcctttttttttcactaaggcatgtttattcccctaatccattaaagagcatgaaaaaaagaataaatgtatttgaaaaaaaaaaaaaaaaaaaaaaaaaaaa

SEQ ID NO: 2774 - DNA, 576 bp, Homo sapiens
  misc_feature (1)..(576): n=a,t,g or c
aacaaaacaaaactcagaaatgttacagaatcagagtattaaaaaatgtacaagtgtatatgcttcccagacacacatggatacatttttcctccacattttcaccatggcagtattaagtagtgagtgtgaatgacacagcatgaaactggttactgaatcagctatgagctcagatggcctcaacatacatactcnagaaatgttgcctgtttaaataactgagagtgtgctaaatctcatctaaaaaaaaggnggagaggggctggggaactcaggccacagtcatgaaaggatgaataccatttccaggtttaataggttcaccatatcgaagtctttgagaatccnatatggaatatccattattttgccaaaggtagagaaagccgttcccaacttttggccaattggaattccgtggaaaaacccnggtggtatataatnccaattaatagtcncgatttccatgcctaccaaaccaccggaaggggtactcgtgagcatctcacggttaagtcngaatgatcgttcncacacgtctgatttccagagttcacagcaggtgcagcccca

SEQ ID NO: 2775 - DNA, 470 bp, Homo sapiens
taggttatttaatttttttgtcagaagtagctataaaaaagccatatgtttcagagagaaattaccctgtattttgccatctctcatttttcagggcaccaaagctgcatgccccccagcagttagaagggcaagattgcattgaaggggtttcagacctctgaagtagtcagttttctcccatgtcttctatggtttaattgtaacataggtagtatgccttcacactggatcccgggggcatgggttttggagatgttattttgtggtgaattgtcatctgcagtattaaagggaagacatattcctgcacatcaccataccttgtttttaaagccagagtcattgtatgatttttattaccagaagtgctaacccggaatgtgatctggttaccttggaaaatgcaggaacttttatgaatgtactgtaaaataaaatgtgggctaattcccagaaactgaaaaaaa

SEQ ID NO: 2776 - DNA, 351 bp, Homo sapiens
caggaccgggcccgagcggaagaccttaatagccgagtctcttactggtctgttggcgagacgattgccctgttcgtggtcagcttcagtcaggtgctactgttgaaaagcttcttcacagaaaaacgacccatcagcagggcagtccactcctagccccggcatcctgctctagggcccctcatgcccaggctggagcagctctcctaggtcacagcctcctggctgggtcgcgtacccagggtggaggcagacgatgcttcctgtggtagcctttgcctttcatgccatcttgattcttgcactcagcagctaaggtctaagaccagtatcagaaggatccactcatta

SEQ ID NO: 2777 - DNA, 600 bp, Homo sapiens
  misc_feature (1)..(600): n=a,t,g or c
tttaccaaaactagctttaatttgtccaaaagccacacagagttgtgtagaaactgatcctgggagggaagctgagagagtccatgatgcgcagggccaaggtgcctctagaagttctccagcaagcccaggatgcgcttttgctcgttctcccggaactccgggctccggccgtccccgatgttctctgcatactccttgatgatatgcctgacaattttgatggagcttcctcgcatgtttaggatctggtgaaccctctggcgaatctgggggacattggcattgcagatctcggccatgatgtagcagatgtgctggagaacaaagagccccgcatccaggcgccggagtagaactcctcctcggtgtcattgtcgatgatctctcctcgccggaccatgtcgtgtttttccccttcaatcttcttgtccgccacctgcattgcacccagatatttaaaatgcaactccattagtctgtcaaccttctcactgtcattttcagtgaatttattcagaagccgggtccgctgctgcctctcaggttccgcagaggggaagccaggatcgaacagacatgtcttcatgtttntttttt

SEQ ID NO: 2778 - DNA, 475 bp, Homo sapiens
  misc_feature (1)..(475): n=a,t,g or c
annttcggcacctgggaaaaaggagagcatcttggacttgtcaagttacatcgacanngacgatccgggtaaagttccagggaggccgcgancagntggaatcctgaagggcttcgacccactcctcaaccttgtgctggacggcaccattgagtacatgcgagaccctgacgaccagtacaagctcacggaggacacccggcagctgggcctcgtggtgtgccggggcagtccggtggtgctaatctgcccgcaggacggcatggaggccatccccaaccccttcatccagcagcaggacgcctagcctggccggggngcggggggtgcagggcagncccgagcagctcggtttcccgcggacttggctgctgctcccaccgcagtaccgcctcctggaacggaagcattttcctttttgtaaaaggtttgaatttttgttttccttaataaaanttgcaaaccttcaaaaaaa

SEQ ID NO: 2779 - DNA, 259 bp, Homo sapiens
aaaaaacacaaaaccctagacataataaatgcctgttttctacaaaaacaatgtctaactctgggtggactgatctcttctcaacagcccagggcagggctggtccctcattcacctgtgtccacagggccgaagacactgcacacactaggacaggatttgattgagtttaaatcctgccaccaccagggaggagtacttctagagcgcccggggccatcgattttcacccgggtgggtacaggtaagtgtaccattg

SEQ ID NO: 2780 - DNA, 413 bp, Homo sapiens
cttgactgcgctcgtttcctcctttctaaagtgagcataccacacagggttctgaggattaaagctaaagtgtatacatcaaacagctctattgctatccctttgcataaatggtggctgctattaaggataaaacttggtaaaaggcaagagctgtttgaatctgaagttttgttttttttttttaacacaaatgagaaaaggagaaaccctgaacttacctagcttttcctctacatggagaaaatatttaattttcttgttaacagtttctcttctcttctgactctgtgatgcttattcttcattttattgaatagttataatgaaattcaaattgctagctttaaccccacttttactttttctgggattttatattcagtattaattatttaaattagcatcctttt

SEQ ID NO: 2781 - DNA, 481 bp, Homo sapiens
ataaatggtttatttttaacataagtaaatttacaaatcaaatgaaaaatgaaaaatacaaaagttcatgaatgaaataaaaaagacactctcaaaatattaaaacctatggaaagaaaataagtaattaatgaatgatgtttttgtttccaaatacaatgaagtgattttttattagagtccttgggaatcatctaagttacaatacagaagagaattaaataaatcgtatatgattttgtaattagacactctatatatcacagttctttgttaacctgggcatggaacgtccctatagcatatatttaaaaccattaattttttttaaaaaaatttgagacatggtttgttcttgttctctaaattatgtttccccatttcccttgaatgttctctattggccatcttctggaacattaaaaaaaaatcttgaaacaaattctcttgcaatgatacgtatcacataaacttgatatgc

SEQ ID NO: 2782 - DNA, 513 bp, Homo sapiens
ctggctttgctggcgaactcctgcacacccttcaaggccctgttcaaatgtctctgtcttaggctgacgcagctgctgcccttctgtggccatacagtgctccttttcacagatgatggctcctgcagggagtgcccccagtgcccagcacagggccaggcacacagtggtgcacgggaacgtctgctgatgcccaccctaaggccaatcaaggagccacggggctgggtcctggtcctcacatcctcttccgcatcttgcccttcttggagcgggcaccccggccgaacgccctgctgcagctcctggacgcggcggcggttgcgggcagagagctgcttgaggccaccacgctgcaggaagtgcagcttctgggcccggcgccgctgcttcaggatctgctgcttggtcttgagttccgggcggactcggcctgcaggggtgcctggggcgtggggccgggatgcaccttggccacggtctcgcttcccacctcttcgctctgggcctcgc

SEQ ID NO: 2783 - DNA, 514 bp, Homo sapiens
caatatggaaatttcagaaggacagaggtgaggagggaggaagaagaaagtatactcctccagaatttcagtgatctgttgtggcagtccagtggaaggaaggtcttttgaggtcacttagaagcatctttttgggacatccttttgggatcttttgtaggctaggcatctcatatcttgagactcacccccagcctccaagcctctctccatttctctaacctatgcattttagagcgagaggaccgcctcactagtgtcaccatcctgccttttctaaaacatgcaggctcacacattctactcctgcttaatgtctgtgttaaacgttttctaaccatttttgttttatttttctgaaaaagttaacccctcccaactcctcacacattggctcttcctcttgagccacaaagttttgattcttgcgatgtatgtgccttattttatgttaatcttgtcaatgagagggaccagttggtgttgcccaatcagcactccaaggctgtgtgtg

SEQ ID NO: 2784 - DNA, 581 bp, Homo sapiens
  misc_feature (1)..(581): n=a,t,g or c
ggnaatgggaaaaggacagcacaggatgccctccaaggatgagctggtccagagatacaacaggatgaataccatcccccagacccgatccattcagtcacggttcctgcagagtcggaatctaaactgtatagcactttgtgaagtgattacatctaaggacctccagaagcatgggaacatctgggtgtgccctgtgtccgaccatgtctgcacaagattcttctttgtatatgaggatggtcaggtgggcgatgcaacattaatactcaggaccccaagatacagaaggaaatcatgcgtgtgatcggaactcaggtttacacaaactgagggggccccagcctcggtaccacccctgttaccccaggatccatctgccctcataaaagtgttcaggtacagcagctgaggctgncctgaggaatcaaggggccattaccaaggggcaggaaaaggatatgtaagaggtggccttcatggtagagcttgacccaagaactactccacattcggatggcccagactgactccatcccctgactttccctttgacttcaccctgtttgtaaataaaacaa

SEQ ID NO: 2785 - DNA, 559 bp, Homo sapiens
acgaaattcggcagaggatttggtgttaagaacttgaaattgcatcccatatttggaaacccatgatccatccatcctagggctctcacttaataaccccagcatccatttatttagcactctctatactctgcaaagtgctctacatacataattttaattaatccccacagccttatgaggtaagtatcatactaattttccagatgggggactgaggttcagagagattatttttcctaaatcacacagaaactatgtatcttagaactggagtttgaacctaggtttctgacttctacattcctgtactccacctatcaagaagtacaaagaagggccttttcagcctagaaacacatgtgataaagctcctatgagattgtgctccttgttcatctgtcatctgctgtgctggtaaggtggctagtaatagtgggtacccaattaacatgctgaataatgtgaaaacgtgagtgaaaaacaaaactttatttaaatggttgattcagaatgatgttttagaaataaatattaaatgctgttatgttttgatttt

SEQ ID NO: 2786 - DNA, 282 bp, Homo sapiens
  misc_feature (1)..(282): n=a,t,g or c
ctctncctcagcatngngacaggggcttccccttcgccgccgccgtcgncggcggncaagntccgncgcgcccgngtcctgcggncctattgcagtttatgttnctttttagtcgtcagggaaagcttcgactgcaaaaatggtatgtcccactatcagacaaagagaagaaaaagatcacaagagaactnnttcagaccgttttagcacggaaacctaaaatntgcagcttccttgagtggcgagatctgaagattgtttacaaaagatatgctagtctgt

SEQ ID NO: 2787 - DNA, 1747 bp, Homo sapiens
cctctagccctccctgcgtttagattcagttgcaccttttattattttaactcttctccttaggacacgcagcccccaatttgtccctccgcctgggcggcccctggtcccgcgcgccagcatgggagagcgagggacctgcccgcggcccgccggcgtgtgcaaggaggtccagccgccgcgcccgctacccggagtctgaggacgggtgtccagggacggagaggcaggtgagagggaggtggctaagctggctatggtgacaggacgatgttggccagaaagagtatcatcccggaggagtatgtgctggcgcgcatcgccgcagagaacctgcgcaagccgcgcatccgagaccgcctccccaaagcccgcttcatcgccaagagcggggcctgcaacctggcgcataagaacatccgtgagcaaggacgctttctacaggacatcttcaccaccttggtggacctgaaatggcgccacacgctggtcatctttaccatgtccttcctctgcagctggctgctcttcgctatcatgtggtggctggtggcctttgcccatggggacatctatgcttacatggagaaaagtggaatggagaaaagtggtttggagtccactgtgtgtgtgactaatgtcaggtctttcacttctgcttttctcttctccattgaagttcaagttaccattgggtttggagggaggatgatgacagaggaatgccctttggccatcacggttttgattctccagaatattgtgggtttgatcatcaatgcagtcatgttaggctgcattttcatgaaaacagctcaggctcacagaagggcagaaactttgattttcagccgccatgctgtgattgccgtccgaaatggcaagctgtgcttcatgttccgagtgggtgacctgaggaaaagcatgatcattagtgcctctgtgcgcatccaggtggtcaagaaaacaactacacctgaaggggaggtggttcctattcaccaactggacattcctgttgataacccaatcgagagcaataacatttttctggtggcccctttgatcatctgccacgtgattgacaagcgcagtcccctgtatgacatctcagcaactgacctggccaaccaagacttggaggtcatagttattctggaaggagtggttgaaactactggcatcaccacacaagcacgaacctcctacattgctgaggagatccaatggggccaccgctttgtgtccattgtgactgaggaagaaggagtgtattctgtggattactccaaatttggcaacactgttaaagtagctgctccacggtgcagtgcccgagagctggatgagaaaccttccatccttattcagaccctccaaaagagtgaactgtctcatcaaaattctctgaggaagcgcaactccatgagaagaaacaattccatgaggaggaacaattctatccgaaggaacaattcttccctcatggtaccaaaggtgcaatttatgactccagaaggaaatcaaaacacatcggaatcatgacagcaagataaccccaagacagtcttttatcaagttttgacggtttatgctgggcactgccagactgaaccagagctggaacacaataatgtgtccttctacattttattacactaaatgatattcatattcaagcaacagcactttctgtagtaataaaaagtaacacaccaagtggaggattcatggcttatgcttgttt

SEQ ID NO: 2788 - DNA, 216 bp, Homo sapiens
gaaagactatgtattcccttttttaattccgtactggtatttgtgttatttaaaaagcaaaattctgctctatttagttgtataatattagaggatactttgctgtgcacaattccaagtgccttagaacattgtttagctttcctaagtatatataaatgcatatatgtataaaattgggaaaagttacctcaataaaatcattgggaaatcccc

SEQ ID NO: 2789 - DNA, 448 bp, Homo sapiens
  misc_feature (1)..(448): n=a,t,g or c
gtgtgtgtatatatagcattgtatttaatcatagactaaatttaatttgatatagaaatactactttacttgtacattaaggtcataatttctgctggactcttttatatttaattaatggggattatagtcttccttcataaatgcatttaaacctgaaattgaacaccagtgtttttctttttctacttatgggaagttgtctgcttccccctttagagaaaacagtatttttatattttgttaaaatattaactactttatgcctacacactatgctgtaggatactgatcataattcttggggtgttcacaaacactcctagtgcctcttttttgggcccgttggaaagtgttgggtattactactttccactacagagcctttggnccctcttaataatgcngagggtgggctggatccntccccnttctgtcctcngggttt

SEQ ID NO: 2790 - DNA, 3150 bp, Homo sapiens
ttcaacctggacgtggaaaagctcgcagtgtacagcggccccaagggcagctacttcggctacgccgtggacttccacatacccgacgcccgcacagcgagtgtcttggtgggggcgcccaaagccaacaccagccagcccgatatcgtggaagggggagccgtctattactgtccttggcccgcggaggggtctgcgcagtgcaggcagataccgtttgacaccaccaacaacagaaagatcagagttaatggaaccaaagaacctatcgagttcaaatccaatcagtggtttggagcaacagtgaaagctcacaaaggaaaagttgtggcctgtgctcctttatatcactggagaactcttaaaccgacaccagaaaaaggaccagttggcacctgctatgtagcaattcagaacttcagcgcttatgccgagttctctccttgcggaaacagcaatgctgatccggaaggccagggttactgccaagcaggatttagtctggatttttataagaatggagaccttattgtgggaggacctgggagtttctactggcaaggacaagtgatcactgccagtgttgcagatatcattgcaaattactcattcaaggatatcctcaggaaactggcaggagaaaagcagacggaagtggctccagcttcctatgatgacagttaccttggatactcagttgctgctggggagtttactggggattctcagcaagaattggttgctggaattccaagaggagcacagaattttggatatgtttccatcattaactcctacgatatgacgtttattcagaatttcacgggagaacagatggcatcttattttggatataccgttgtcgtatcagatgttaacagtgatggactggatgatgtcctggttggggcacctctctttatggaacgtgaatttgagagcaaccccagagaagtagggcaaatctacctgtatttgcaagtgagctctctcctcttcagagacccccagatcctcactggcaccgagacgtttgggagattcggtagtgctatggcacacttaggagacctgaaccaagatggctacaatgacattgccatcggagtgccttttgcaggcaaggatcaaagaggcaaagtgctcatttataatgggaacaaagatggcttaaacaccaagccttcccaagttctgcaaggagtgtgggcctcacatgctgtcccttccggatttggctttactttaagaggagattcagacatagacaagaatgattacccagatttgattgtgggtgcatttggaacaggaaaagtcgctgtttacagagcaagaccggttgtgactgtagatgcccagcttctgctgcacccaatgattatcaatcttgaaaataaaacttgccaggttccagactctatgacatctgctgcctgcttttctttaagagtatgtgcatctgtcacaggccagagcattgcaaacacaatagtcttgatggcagaggtgcaattagattccctgaaacagaaaggagctattaaacggacgctcttccttgataaccatcaggctcatcgcgtcttccctcttgtgataaaaaggcagaaatcccaccagtgccaggatttcatcgtttaccttcgagatgaaactgaattccgagataaattatctccaatcaacattagtttgaattacagtttggacgaatccacctttaaagaaggcctggaagtgaaaccaatattgaactactacagagaaaacattgttagtgaacaggctcacattctggtggactgtggagaagacaatctgtgtgttcctgacttgaagctgtcggctagaccagataagcatcaggtaatcattggagatgaaaatcaccttatgctcataataaatgcaagaaatgaaggggaaggagcatatgaagctgaactctttgtaatgataccagaagaggcagattatgttggaatcgaacgcaacaacaagggatttcgaccactgagctgtgagtacaagatggaaaatgtaaccaggatggtggtgtgtgaccttgggaaccctatggtgtctggaacaaattattccctgggcctccgatttgcagttccacgtcttgagaaaacaaacatgagcattaacttcgatctccaaatcagaagttccaacaaggacaatccagacagcaattttgtgagcctgcaaatcaacatcactgctgtagcgcaggtggaaataagaggagtgtcacaccctccgcagattgttctgcccattcataactgggaaccagaagaggagccccacaaagaggaggaggttggaccattggtggaacatatttatgagctgcacaatattggaccaagtaccatcagtgacaccatcctggaggtgggctggcctttctctgcccgggatgaatttcttctctatattttccatattcaaactctgggacctctgcagtgccaaccaaatcctaatatcaatccacaggatataaagcctgctgcctccccagaggacacccctgagctcagcgcctttttgcgaaactctactattcctcatcttgtcaggaagagggatgtacatgtggtcgaattccacagacagagccctgcaaaaatactgaattgtacaaatatcgagtgtttacaaatctcctgtgcagtgggacgactcgaaggaggagaaagcgcagtcctgaaagtcaggtcacgattatgggcccacaccttcctccagagaaaaaatgatccctatgctcttgcatccctggtgtcctttgaagttaagaagatgccttatacagatcagccagcaaaactcccagaaggaagcatagcaattaagacatcagttatttgggcaactccgaatgtttccttctcaatcccattatgggtaataatactagcaatacttcttggattgttggttctcgccattttaaccttagctttatggaagtgtggattctttgacagagccagacctcctcaggaggacatgaccgacagggaacagctgacaaatgacaagacccctgaggcatgacaagaaaaaaaaaagaagaccaaagacctgaaacactggtcctgttcaaagaaaaagaaagaacatgaggcc

SEQ ID NO: 2791 - DNA, 920 bp, Homo sapiens
gcacggaggggcagagaccccggagccccagccccaccatgaccctcggccgccgactcgcgtgtcttttcctcgcctgtgtcctgccggccttgctgctggggggcaccgcgctggcctcggagattgtggggggccggcgagcgcggccccacgcgtggcccttcatggtgtccctgcagctgcgcggaggccacttctgcggcgccaccctgattgcgcccaacttcgtcatgtcggccgcgcactgcgtggcgaatgtaaacgtccgcgcggtgcgggtggtcctgggagcccataacctctcgcggcgggagcccacccggcaggtgttcgccgtgcagcgcatcttcgaaaacggctacgaccccgtaaacttgctcaacgacatcgtgattctccagctcaacgggtcggccaccatcaacgccaacgtgcaggtggcccagctgccggctcagggacgccgcctgggcaacggggtgcagtgcctggccatgggctggggccttctgggcaggaaccgtgggatcgccagcgtcctgcaggagctcaacgtgacggtggtgacgtccctctgccgtcgcagcaacgtctgcactctcgtgaggggccggcaggccggcgtctgtttcggggactccggcagccccttggtctgcaacgggctaatccacggaattgcctccttcgtccggggaggctgcgcctcagggctctaccccgatgcctttgccccggtggcacagtttgtaaactggatcgactctatcatccaacgctccgaggacaacccctgtccccacccccgggacccggacccggccagcaggacccactgagaagggctgcccgggtcacctcagctgcccacacccacactctccagcatctggcacaataaacattctctgttttgt

SEQ ID NO: 2792 - DNA, 1584 bp, Homo sapiens
cggggcagctctgaggaacaaggtggaagctcagagcgctggtctccaccctggtgcccctgggctggtgctggcagtgggagccgtggctgtggatgagagacatagacgagagagtgagatggcctggtttgccctctacctcctgagccttctctgggctacagctgggactagtacccagacccagagttcatgctccgttccctcagcacaggagcccttggtcaatggaatacaagtactcatggagaactcggtgacttcatcagcctacccaaaccccagcatcctgattgccatgaatctggccggagcctacaacttgaaggcccagaagctcctgacttaccagctcatgtccagcgacaacaacgatctaaccattgggcacctcggcctcaccatcatggccctcacctcctcctgccgagaccctggggataaagtatccattctacaaagacaaatggagaactgggcaccttccagccccaacgctgaagcatcagccttctatgggcccagtctagcgatcttggcactgtgccagaagaactctgaggcgaccttgccgatagccgtccgctttgccaagaccctgctggccaactcctctcccttcaatgtagacacaggagcaatggcaaccttggctctgacctgtatgtacaacaagatccctgtaggttcagaggaaggttacagatccctgtttggtcaggtactaaaggatattgtggagaaaatcagcatgaagatcaaagataatggcatcattggagacatctacagtactggcctcgccatgcaggctctctctgtaacacctgagccatctaaaaaggaatggaactgcaagaagactacggatatgatactcaatgagattaagcaggggaaattccacaaccccatgtccattgctcaaatcctcccttccctgaaaggcaagacatacctagatgtgccccaggtcacttgtagtcctgatcatgaggtacaaccaactctacccagcaaccctggccctggccccacctctgcatctaacatcactgtcatatacaccataaataaccagctgaggggggttgagctgctcttcaacgagaccatcaatgttagtgtgaaaagtgggtcagtgttacttgttgtcctagaggaagcacagcgcaaaaatcctatgttcaaatttgaaaccacaatgacatcttggggccttgtcgtctcttctatcaacaatatcgcggaaaatgttaatcacaagacatactggcagtttcttagtggtgtaacacctttgaatgaaggggttgctgactacatacccttcaaccacgagcacatcacagccaatttcacacagtactaacgaagaggtgggttcagcttctatcaaacatctccaaaggatgggtgaaattttttccacttcattttaaatctatgcaaaaaagcgaatgcctgtgatgctaccatattcctggtaaaaacatggagaaccactatgtagaataaaaatgcaaagttcactggagtctcaacatctatgactcatgaaaataaaattttcatcttctc

SEQ ID NO: 2793 - DNA, 566 bp, Homo sapiens
  misc_feature (1)..(566): n=a,t,g or c
taatctttagaacttaaattctacaagaattttaaatattttctgtatataattatgacattgtcacacagaaattacacattttatgtgccagaagccttaaacatctttctgtgaaaatgctgatatattgtgacagttatttcacatttgatatgtagagaggaataggggttagtttatgtttatattgaaaaactttaaagactatttggaagttccagaaattctggttttaattcaagtaaaatgataaaatagtcattatatagttcagatgctaatattctaagtaataatatatatttacattgaagctaaaactgttaagccaaaacaatgcccattttgtcggcttacagctcttccngagtctaggagccngttgggggttcngtcccnactttaaggnttttaattggcccacttatttccgaaaggnttggttccaaccaggtggtattaaaattggtttttcnctaaaacnactggggtatcnggcccctggggggttttttttncaatttnattaaaggccggtgnatatttgggggggccttttaaat

SEQ ID NO: 2794 - DNA, 4834 bp, Homo sapiens
cgaggtcagaggggaggaggactctggagctgacagcgcgcacttcacccgcagttgttctagcgactgcgaagatagctcgctgagctggaaccccacagatcaccaacaaaaatgaaggcggcagatgagcctgcctacctgacagtgggaaccgatgtcagtgccaagtaccgaggtgccttctgtgaggcaaagattaagactgtgaaaaggctggtgaaagttaaggtactcctgaaacaggataataccacacaattggtacaagatgaccaagtaaagggtcctttaagagttggagctattgttgaaacaaggacatctgatggatcttttcaggaagctattatcagcaagttgacagatgctagttggtataccgtggtgtttgatgatggtgatgagcgaacattgagacgtacctcactttgtctgaaaggagagagacattttgcagagagtgagacacttgaccagcttccattaacaaatccagagcattttggaactccagtaattgcaaagaagacgaacagaggaaggagatcttctcttcctgttactgaagatgaaaaggaagaagaaagcagtgaagaggaagatgaagacaagcgccgtctcaatgatgaattactaggaaaagttgtaagtgtggtgtctgcaacggagaggactgaatggtatcctgctttggtaatatctcccagctgtaatgatgacatcacagtgaaaaaggatcagtgtttagttcgatcatttattgattctaaattttactctatagcaagaaaggacattaaggaagtagacattctcaatctaccggaatctgagctctccactaaaccagggcttcagaaagcaagcatcttcttaaaaactagagttgttcctgataattggaaaatggatataagtgaaatccttgagtcatccagtagtgatgatgaagatggcccagctgaagaaaatgatgaagagaaggaaaaggaggccaaaaagacagaagaagaggtgcctgaggaagaacttgatcctgaagagagggacaacttcctccagcagctttataagtttatggaagacagaggtactccaatcaacaaaccacctgttttgggctataaagatctcaatctcttcaaactcttcagactggtttatcatcagggtggatgtgacaatattgatagtggtgctgtatggaagcaaatttatatggaccttggcattcctattttgaattcagctgcttcctacaatctaaaaactgcttatagaaagtatctctatggttttgaggagtactgccgttcggcaaatattcagttcagaactgttcatcaccatgaaccaaaagtaaaagaggaaaaaaaagacttagaagaatcaatggaagaggctctcaaattagatcaagaaatgcctttaacagaagtgaagagtgaacctgaggaaaatatcgattcaaacagtgaaagtgaaagagaagagatagaattaaaatctccgaggggacgaaggagaattgctcgagatgtaaattctattaaaaaggaaattgaagaagagaaaacagaagacaaattaaaagataatgatacagaaaataaggatgtagatgatgactatgaaactgcagagaaaaaagaaaatgagctactactggggagaaaaaatacaccaaagcaaaaagagaagaaaattaaaaaacaggaggattctgacaaagactcagatgaagaggaagagaaaagccaagagagggaagaaactgaaagcaaatgtgactctgaaggagaggaagatgaggaagacatggaaccctgcctaacaggaaccaaagtgaaagtaaaatatggacgagggaagacgcagaaaatttatgaagccagtattaaaagcactgaaattgatgacggagaagttttatatttggtacattactatggatggaatgtcagttatgatgagtgggtgaaggctgacaggataatctggcctttggacaaaggtggaccaaagaaaaaacagaagaaaaaagctaaaaataaagaagatagtgaaaaggacgaaaagagagatgaggagaggcagaagtcaaaacggggacgacctcctttaaaatcaaccctctcatcaaacatgccgtatggcttatctaagacagcaaacagtgaaggaaaatcagactcttgttcatctgatagtgaaacagaagatgctttagaaaagaatttaataaatgaagaactttctcttaaagatgaactagaaaaaaatgaaaatttgaatgatgataagctagatgaagaaaatccaaagatttctgcacatatattaaaagaaaatgataggactcaaatgcagcctttagaaaccctgaagttagaagttggagagaatgaacaaatagtacagatttttgggaacaaaatggaaaaagcagaagaagttaagaaagaagccgaaaaatctccaaaaggaaagggaagacgaagcaagacaaaagatctttctttagaaattataaagatttcatcatttggccagaatgaagcaggaagtgaacctcatatagaagctcatagtcttgaattgtcttcattagacaataaaaacttttcttctgctacagaagatgaaattgaccaatgtgtgaaagaaaagaagttgaaacggaaaatactaggacaatcatcgccagagaaaaaaataagaattgagaatggaatggaaatgacaaatactgtatctcaagaaaggaccagtgattgtattggatctgagggaatgaaaaacttaaattttgaacagcactttgaaagagaaaatgaaggaatgccatcattgatagcagagtcaaaccaatgcatccaacaactgactagtgaaagatttgatagtccagctgaagaaactgtaaatattccactaaaagaagatgaggatgcaatgcctctgatcgggcctgaaaccttggtttgccatgaagtagatttggatgatttggatgaaaaggataagaccagcattgaggatgtagcagttgaaagctctgagtctaactctcttgtttctattccacctgccctacctcctgtagtccaacataacttttcagtagcttcaccacttactcttagtcaagatgagtctcgaagcgtaaaaagtgagagtgatataacgattgaagttgatagtattgctgaagaatctcaagaaggtctctgtgagagggaatcggcaaatggatttgaaactaatgttgcctctggtacctgtagtataattgtacaagagagagagagcagagagaagggtcagaagaggccaagtgatggaaatagtggattaatggcaaaaaagcaaaagcgtaccccaaagcgaacaagtgctgcagccaaaaatgaaaagaatggaacaggacaaagcagtgatagtgaagatctccctgtcctagacaattcaagtaaatgtaccccagtaaagcatcttaatgtatctaagccacagaaacttgcacgatctcctgcaagaatatccccgcacatcaaagatggagagaaagataaacacagagaaaaacatccgaattcatcccctaggacatataaatggagctttcagctcaatgaattagataatatgaacagtacagagagaatctcatttctccaagaaaaactacaggaaatcagaaaatattatatgtctttgaagtctgaagttgcaaccatagacaggaggagaaaaagattaaaaaagaaagacagggaagtgtctcatgcgggagcctccatgtcatctgcttcatcagacactggaatgagtccctcatcatcatctcccccacaaaatgtacttgctgtagaatgcaggtgataaacattttctctaccttcccagcagtttgctgccatggacataaatccccaaaccctgaattacaaccacagaaagcactcaactggtttgacattgctaagtatatcctgtatacttttccaggctggattgtatctattcccctctctcttcttttttcttgttgcaaaaaataagctgattaataagtgaaggttaagcagcctgccatatttgtcataatttttcctctttacttttgtttttcgtttgttgtgatatagaacaaagggcacttagcaaatttgaatttgtataataaagctttcaggtgttacagaaatcgtagacaagcaagtgcacatgataaacaatcaaaatattacccagctgaatagttactgctgcactttcactaagatgtatttgaacacttggtgagtagggggtttatgttgtgttttttttcattatcgttttttttatttttgtgaagcacttgctatttagaactgccaaagtatatgttcagcagtgtgcccaggattgaaggtgtaaatgggacaaaataaattgtgaaaggaagtgtagttgactgaaaactacagttgtaataagtcttccactttttataggatttttgagcacacaattatgcaaatattttaatgtttattaatgtttacagtggaattgtgaataagttttcagtggactatcttatcccttgacaaaaatattttgtcttttttctatgtaatttcagagtttttattttgttacaaaaagacaaaaatgaaatatataacaacaatgaagttatttaacaagatttctaaagctgaaatttttgtgtaaaataaggtattatcttgcaacttgttaaatatatttattcagacattggatgttgtatttttatgtattttttaaaatattaataaaatttaaaaaaaaaaaaaaa

SEQ ID NO: 2795 - DNA, 1023 bp, Homo sapiens; identical to SEQ ID NO: 251

SEQ ID NO: 2796 - DNA, 1346 bp, Homo sapiens; identical to SEQ ID NO: 2100
  misc_feature (1)..(1346): n=a,t,g or c

SEQ ID NO: 2797 - DNA, 500 bp, Homo sapiens
tgtctttttattaatggccatttggactggtgtgagatgatatctcattatggtttagatttgcatttttctgatgattagtgatggcttttctctagggtgaaggtacactcgagcgtggtcattgaggacaagtccgacgagagatcccgagtacgtctacagtcagccttacgagtggactgatcaagttgaaagcaacagaacaagcatctataagaattgattatatgtcccagcactttggaaggctgaggcaacgtggatcccttgggcctaggacttcgcgagaccagttgggcaacatgatgaactcctactaattttcgtccttcagaacaagatggaagaaactacggtcacatatgcaaatggagaagatgatgaacacagaaaaattatgcaaagataatccctaaaaccttctttctcatcaaaagttatagcaaggtggtttatatatcactgacggaacacgatgctttgtttaatgaagaccc

SEQ ID NO: 2798 - DNA, 835 bp, Homo sapiens
  misc_feature (1)..(835): n=a,t,g or c
nnnnccccncccnnnnccnnntcttctagtttgncgattttgtcttggcttggngatggcgcggcgtncgtgttcgagttctctgcaggtcactagtttcccggtagttcagctgcacatgaatagaacagcaatgagagccagtcagntggactttgaaaattcaatgaatcaagtgaaactcttgaaaaaggatccaggaaacgaagtgaagctaaaactctacgcgctatataagcaggccactgaaggaccttgtaacatgcccaaaccaggtgtntttgacttgatcaacaaggccaaatgggacgcatggaatgcccttggcagcctgcccaaggaagctgccaggcagaactatgtggatttggtgtccagtttgagtccttcattggaatcctctagtcaggtggagcctggaacagacaggaaatcaactgggtttggaaactctggtggtgacctccgaagatggcatcacaaagatcatgttcacccggcccaannangaaaattgccataacactgagtngatccagtttggcttacatgactgcaannnnnnnnnnnnnnttnnccacnttnnntccanannnnnnnnnnnnnccncnntnncnntnccaannnnncccccncncccnntnncnccccnccnnnnnnccncncncccnnnnccnncncccncnnnnnnnnnncnncncncccnnnnncnnccncnnnnnnnncncnccncccnnnnnnnnnccnncccnncnncccnncccncncnncnccnncnnnnnnncnnnnncnnccncnnncnnnccnncccncccccnnnnncnccncnccnccc

SEQ ID NO: 2799 - DNA, 351 bp, Homo sapiens
  misc_feature (1)..(351): n=a,t,g or c
ccactcctgggctaaggagtaacctccctcatctctaactgcccccacgcgcaagcggctaccccagaacttttaactcttccaggacagggagcttcgggcccccactctgtctcctgcccccgggggcntgtggtaagtaaaccatacctaacctaccccagtgtgggtgtgggcctctgaatataacccacacccagcgtagggggagtctgagccgggagggctcccgagtctctgccttcagctcccaaagtgggtggtgggcccccttcacgtgggacccacttcccatgctggatgggcagaagacattgcttattggagacaaattaaaaacaaaaacaacta

SEQ ID NO: 2800 - DNA, 477 bp, Homo sapiens
  misc_feature (1)..(477): n=a,t,g or c
gaaagctgacagtctgttctttgtaaactgcctttccctgtttttctgttttgttttgtttctcaagtttcattttttactaagccccttctgacacctaggcagataaagataagagtagtgcgcagtacaaatgtcagctctgaagaggaggaagtaaatcttcaatgctagggcagatcttcactatccgtgatccagtcttaatttgagcatgagagcaaaatttagtcatctacacaagaagcaaaagcaaggaatagttgttgggtttttgttttttggttgttgtctntnttntntttttaggcaagaagtgttgccggtaggnatgtgtgctttctttgccttcctatttcctttcaaagaaatccctgtaaattcaaaactgtgaaattgggttgccaaaaactgttgncctcgttagatgcctccaacagtgtaaatcnatactgcaccatgtccacctntgggtcc

SEQ ID NO: 2801 - DNA, 4080 bp, Homo sapiens
gcccatgagcgcgccgcggcccgggctggcgtgcgggtgcggctgcggcggccgcgcggcggggccccgggaggcgggtcgctgagcggggcgcgcggccccgaggatgcgggagcgggagcgggagcagcgctggcgtcaatgctcccttcctcgggccattggagactccgttgctttttaatggcggcagcggctgctgggtgagcagctggaggccggacagtgttcgtcccatccggagaggatcgctttctcctggcgtcaccagcgctgggttggtgggggtagcttttccctctttgctcctccattcttgaagaaagaagaagatgccactgccatttgggttgaaactgaaacgcacccggcgctacacggtgtccagcaagagttgcctggttgcccggatccaactgcttaataacgagtttgtggagttcaccctgtccgtggagagcactggccaggaaagcctcgaggccgtggcccagaggctggagctgcgggaggtcacttacttcagcctctggtactacaacaagcaaaatcagcgccggtgggtagatttggaaaaacctttgaagaagcagctggataaatatgcattggaacctaccgtctattttggagtggtgttttatgtgccttcagtttctcagctgcagcaggagattaccaggtatcagtattatctgcaactgaagaaagatatcttggaaggaagtattccttgtaccttagaacaagcaattcagctagcaggcttagctgttcaagcggattttggtgactttgatcagtatgaatcccaggactttcttcagaaatttgccttgtttcctgtgggatggttacaagatgaaaaagtattggaagaagcaacccaaaaagtggccttactacatcagaaatacagagggctcacagctcctgatgctgaaatgctgtacatgcaggaggtagagagaatggatggctatggagaagagagctaccctgctaaggatagccaaggaagtgacatatccattggagcgtgtcttgaaggtatctttgtgaaacacaagaatggaaggcatcctgtggtatttaggtggcatgacattgccaacatgtcccacaacaagtccttttttgcattagagctggcaaataaagaggagaccattcaatttcaaactgaagacatggaaacagcaaaatacatttggagactctgtgttgcgcgacacaagttttacagactaaaccagtgtaacctgcaaactcagactgtcacagtgaacccaatcaggaggaggtcttcttcaaggatgtctctgcctaaaccccagccctacgtgatgcctcccccaccgcagttgcactataatggacattatacagaaccatatgcttcttcccaagataacctctttgtgcccaaccagaacggatactactgtcactctcagacaagcttggatagagcccagattgacttcaacggtcggatccgtaatggcagtgtctacagtgcacacagcaccaactccttaaataatcctcagccctacttgcagccctcgccgatgtcgtccaaccctagcatcaccgggagtgacgtcatgaggcctgactacctcccgtcccatcggcacagcgccgtgatacccccgtcctaccgccccaccccagactatgagactgtgatgaagcagctcaacaggggcctggtgcatgcggaacggcagagccactcgctgcgaaacctcaacatcggcagctcgtacgcctacagcaggcccgcggcgctggtctacagccagcccgagatccgcgagcacgcacagctcccctcgccagcggccgcacactgcccgttcagcctgagctacagcttccacagcccgtctccctacccctaccctgccgagcggcggcccgtggtgggcgcggtcagcgtgccggagctgaccaatgcgcagctgcaggcgcaggactacccgtctcccaacatcatgcggacgcaggtgtaccggccacccccaccctacccgccccccaggcccgccaacagcacgccagacctgtcccgccacctttacatcagcagcagcaaccccgacctcatcacgcggcgcgtgcaccactcggtgcaaacgttccaggaggacagcctgcccgtggcgcactcgctgcaggaggtcagcgagcccctcaccgccgcgcgccacgcgcagctgcacaaacggaacagcatcgaggtggccgggctcagccacggcctggagggcctgcggctcaaggagcgcaccctatccgcgtcggcggcagaggtggcgccgcgagccgtctcggtgggctcccagcccagcgttttcaccgagaggacacagcgagaagggccggaggaggcggagggcttgaggtacggccataagaagtccctgtcggacgccaccatgctaatccacagcagcgaggaggaggaggacgaggacttcgaggaggagagcggggcccgggcgccccctgcacgtgcgcgcgagcctcggcccggcctggcccaggacccacctggctgccctcgcgtcctgctcgccgggcccctgcacatcctggagcccaaggcccacgtcccagacgcggagaagaggatgatggacagcagccccgtccgcacgaccgcagaggcccagcggccctggagagacgggctgctgatgccctccatgtcggagtccgacctcaccacgtcaggccgctaccgagcccggagggactctctgaagaaaaggccggtgtcggaccttctctctgggaagaagaacatcgtggaagggctcccgcctctagggggaatgaaaaagactcgagtagatgcaaaaaaaattggtcctcttaaactggctgccctaaatggactctccctatctcgagtgcctctgcctgatgaaggaaaggaagtggctaccagagcaacgaatgatgaaaggtgtaaaattctggaacaacgattagaacaaggaatggtattcacagaatatgaaagaattcttaagaaacggctagttgatggggagtgctcaacagcacgactccctgaaaatgcagaaagaaatcgattccaagatgttcttccttatgatgatgcgagagtggagttggtcccaactaaagaaaacaacactggttacatcaacgcatcacatattaaggtctctgtcagtggaatcgaatgggattatattgccacacagggaccattacagaatacctgtcaagatttttggcagatggtatgggaacagggaattgcaattatagcaatggtgacagcagaagaggagggtggaagggagaagagctttaggtactggccacgacttggttccaggcacaacactgtcacctatggaaggtttaagatcacgacccggttccgcacagactctggctgctatgccaccacaggcctgaagatgaagcacctccttaccgggcaagagaggaccgtctggcacctccaatacacagactggcctgaacatggctgtccagaagacctcaagggatttttatcatatcttgaagagatccagtctgttcgacgccatacaaatagcacaagtgatccccaaagccccaaccctccgttgttggtccactgcagtgctggggtaggaaggactggcgtggtgattttgtcggagatcatgatcgcctgcctggaacacaatgaggtgctggacatcccgagagtgctggacatgctgaggcaacagagaatgatgctggtgcagactctctgccagtacacatttgtgtacagagtcctcatccagttcctgaaaagctccaggctcatctaagctcccacaatttcttacggggccagtcatgtgaagcgtttacagcttaaaaaaaaagcgcttgcctaactcatactttcccgttgacacttgatccacgcagcgtggcactgggacgtaagtggcgcagtctgaatggcggcacgctgaaggaaacgtgcgaagcacaggctgaagaggggtttctaacctgggaaaggtgctcaaggaggacttggtttca

SEQ ID NO: 2802 - DNA, 1530 bp, Homo sapiens; identical to SEQ ID NO: 315

SEQ ID NO: 2803 - DNA, 391 bp, Homo sapiens
ttcaaaagtggaagcttgtttaatattgctctaccatcatcctgaaaggcataataatttgagttacacatctgaactgattggagttacagaatcatatctcctttttgcatttaacaatatatacaatataaaataaatacatttacacaaatggacatttgctggagcacacagtatggtacacatcacaaaaatatacaattgattgctttacagatgtgaagcccatctacagctatagacatggttttattattattattattatttttactactggctataatgcaactcctggattattataagcagtttaaattttttgtccttttacgatctttgcacataagactgccataaaatgtttttcctaaggcaggtaaacagg

SEQ ID NO: 2804 - DNA, 414 bp, Homo sapiens
  misc_feature (1)..(414): n=a,t,g or c
ttttttttttttttgcagatcactttgtatttattacattactgaactttttcaaatgacagaattcaactccaaaataaagtaataaatgcctattaaataattattcacttgtatttttctcncctaaaattttnaccccagcaaaacatcttaaagacatgtgaataggttcagtgcactctcagtggctcacaatcatgaggcaaatactacatttatccataaaaatataagataaacagatcaatattttaaaatattgctgacataaaaggaaaaaataaaatactacacttttaccacaattattttggtagatgatagtagaacattgtttaaaataatgctcctctacaggacacatgctgtgcttggtatacttgggcacattagcagttgggtaactggtcc

SEQ ID NO: 2805 - DNA, 212 bp, Homo sapiens
taggttaagaaaactgcaggagttgtcatgaaattctattggaaagaatataaaaattatcttggttttaaattgataccaaagtctgtctagaaacaacccaaccactgcaaatttggtttttgcaagttaatttaattcaaaaaaatacttgtactcccgtgttttaaatggtcttaattattcatcaccataaaaagtagtttaggaga

SEQ ID NO: 2806 - DNA, 470 bp, Homo sapiens
caaatagaaaataataatttattttaacttcattttactgtttgtaactaatcatgattttgtgaacttgcctgtataagtctgtaccttcaaatctacaaagcaaaagtttactacaatgagcacttaaaattccacaaaccgtctccatccacaactttcctgtacatgcaaattctttcagtgggctgcaatatttgcaaacatgctttaaacttccataaagatgcaagatattttgctttctgctaaaacctttacactctcttgggaaccttaaccaggaaaatgtttaaatgtatatcccaactctaaacgctgccggtttggttatatgtattaaatcgttaaccaccgggttgggtggttttgagttgaaaccttcacctaaatggataatatcttaacgggtcacgcatatgaaacacattcagtaacgtaccattataaaatagggggtccattaaaaa

SEQ ID NO: 2807 - DNA, 516 bp, Homo sapiens; identical to SEQ ID NO: 1700

SEQ ID NO: 2808 - DNA, 99 bp, Homo sapiens
  misc_feature (1)..(99): n=a,t,g or c
ntttttattctaaaataaagaacatttattatcacaagttggataaaaacacacagcttttacaaaaatgatttttgatagaaaaatatgtttgaatac

SEQ ID NO: 2809 - DNA, 446 bp, Homo sapiens; identical to SEQ ID NO: 2113

SEQ ID NO: 2810 - DNA, 397 bp, Homo sapiens
ttttttttttttttaagatgtaagaaaatatatttattttttccatgacaatactatgataaaattgttaaatacatgcatgttttaaaaacagacataagtaacatctttagagttaacagccaagcatactagttttacatttatggtgttttagtaatagattattttctatgtttttgctataatcatgttttccaaaagatacagaaactaaattctgaaattatacaatgatataaagtgtccaaatttcccattctaacagcaatttaaaatccaaattttcacaaggcaggaaatgcttcagttatcatctaagtggagttgttttattccatattactctccagaattctgtgaatcagactggaatcacaccccatgggacttcatc

SEQ ID NO: 2811 - DNA, 427 bp, Homo sapiens
  misc_feature (1)..(427): n=a,t,g or c
ttttttttttgcataaaatactgtttattttgtcctttaggaagactaaagtagtccagctcccctacagcccagtcttgcccccaccctgcactctgtcgccttagttcctggggaccaagcatctggcatttctcaagcagaccctctccttgttgctccttttcagtccctggagtctggcttcccaaagccaaagctggaggagagctcattgctgaggaagcagggttggagcctgaggagatgcagagggcctggacccctcgctggatcccagaggcccaggggcaagagatgctgggacagggctctaggggaccactgggtgactcttgaggggctagaagcagggctggggtnacttttgctacggtgggctgcaanactgtctngcttcttaaagcgcttgccgcagaatttcaaa

SEQ ID NO: 2812 - DNA, 397 bp, Homo sapiens
gctgattgaaaatgatttattaaagtccaattagtatgcttttcatttcaaataatccatatagcctccagaaaaatatgcacatgtgtaaaagtccacgttcatttctttcacttccaatataaagtattctgtattttgtataaagtacgtgcaaacacctttctgctaatcgggtccccacattcttttcactacaggtactttacaagtctgccctctgctcaaacactaaccgtgcactgacatcctccttcctagacagccattcatctcccggacttctttctctcagacatcctcctgacctcccctgacctgcttcaccactgtgttacctcactggttacttgttacagcaaactgatgcaactactagtctacctgggacaacata

SEQ ID NO: 2813 - DNA, 154 bp, Homo sapiens; identical to SEQ ID NO: 1498

SEQ ID NO: 2814 - DNA, 391 bp, Homo sapiens
acaagtatctacaaaatctttataaattcacatatttttctgaaagtgtacaagcagtctcaatttactgggacaaaaatgaacatttttgttctttagtaatgaagtcaatgtacaattcagagcaggtgtccatagaaacaactaggtttgaaaaaacttaagacaattcacagttgaaatcaaacaaacactgtgaatgtgttaaatacttgccatataacaacgctttaacattgatcttgctaaataaggctatgattcataagatgcatgtatttccaaagctgtttaacattcttataaattaattcacaggattcaaatagttgctttttagcttcaactgggtattagcaaaaataatacaaaatgatccccgtgcaagcac

SEQ ID NO: 2815 - DNA, 383 bp, Homo sapiens
tactctctagaaaatatttattgacacattttaattttctttccatattctgagaaataaacaaaatacacaaaatacagtaaaatgcacttttcccatttcaaataaatatactatactcttgtaaaaaaatttaataatctgtgtaatttgccacagtatattaatcagtgaaataaaacaaagaatctctaaattgtcacatgttttaatgattctcacaagcatttttctggagaaaaagaacactattttctgtagaatttatattgacttggagactattgcttcttgtttggagaaggcaaagataagctttttaaaaagtgtttagtgtcaaaaagagtcttcatttgggagaaaaacagcatacaagtcctttc

SEQ ID NO: 2816 - DNA, 381 bp, Homo sapiens
ctctttttttttttttattccatttttacacatccacctgtttgccatgaagtcacaacattttatcaaaatatacacacagcacaaatacctttaaaatgtatggttggaattctaattcaactcaattgactgctgcaaacagcatgcatgggccattgatcttgaatgatgcctacggaggggcttatgagtcatgaaatcaccagtcatggcacgagaaggggttaaggttcttttcccaggagacttatgcacttcatttcttttcttgttatagtgtgagaatggcagtgagtgactgtgccaatactggagtctgctgagaatgggtggatggaaaggtttttactggcaagggtgaaatgatactatcttttc

SEQ ID NO: 2817 - DNA, 339 bp, Homo sapiens
ccacgcaatcacaccatttattgctgtgctgtccggggaagacaccgtgcaaatgccaaagtgcactgaggagaggggagggtctgtgactcccaaaccctcgaatattttatgaatctaagagtccagacgcagttcatccacggagatctgcgccccgtccacaccaacacccacgtttgtgcacccacatgtgcacggtgctcttcagagcggcgaggtcctcccccgcggagaaattggtgggagaggcagaggtcactgagtttcctcctgtttcgtgtcacctcttggcaacctgtgcctggcttctagaagcggcatgggcaagaaaaggaa

SEQ ID NO: 2818 - DNA, 464 bp, Homo sapiens
ttttttttttttctcacttccctttttatttcctctaagacttgcaagcagcagcaccagagagggaacctgccctcctggccctggaagggcggacccccaacccctaacccaggacacagctggcacctcaggcccctttccttctgaaaggagggctgtgtctctctcacattcacacatacacagacacatgcatgtgtgcacactcatggcacatgggacctcaggggtagcctgtttgccgatccccccaagaggtaccaggaggcagaccgctagaaggagataagaggcaccctggtctcctccaacccaaggaggaagaaagctcaacccctctaggatagggactgtcttcagtcaatggagcgttgacttagggggcgtttttgaaggttttttttcctcctttttgcagtctttacaaaaatagaacttctcttggtatttataaatctacg

SEQ ID NO: 2819 - DNA, 281 bp, Homo sapiens
taccaaaatatctgtattatctataaaaattgaactctaatgagtcactgatacgggaggcagcaatacccgactgtgctgacatgcagaaggaagacagctctgtcccaccaaccctatagcagaacatttgtattgagtggcacgtgggctgagtcatttgtaaggtctcaaaaacctggacactttggaacgtagcaatcggatgaacgatcttggaaacatctctcgggactcctgggctgtgtacttgaaatagttctggggatgggccaggacat

SEQ ID NO: 2820 - DNA, 353 bp, Homo sapiens
ttttttttttttttttttttttttttttttttttttttttttttggggcttatgttgatttaattttcacaaagatcagattggatgccctctgatgtggggctgtggagacaacctgacagatctgggatggaggcaggtatagcagcattgggttttggtatcaccatcacctgtaataccaactaatctccaaataaaacccaaactctgtaccttaatctggattgttgtgctctgcaaacgaacggggacgagggccgtttgccatggaaatttatctccatcacctaatccctaaatagggccaggttccacacagatacctcttggtgggaggtattacccaggct

SEQ ID NO: 2821 - DNA, 422 bp, Homo sapiens
aatcaatttaattaaaatgataaagtacttacagcaaaataatggctatacaaatacagtatctacttacagcaggtggatacactatagataagatatatcccatctagattatgtgtcataagcaaacttctgtttaagtaaaataaatgtcccaatccaatttcaaatatagtttccctctctctcattaaaaaaaattactagagtccaattattatttaataaaccctacggcactgagaaaactagcaaaggggtgcaaagaagtagtagaaataatttaagcaagactaaaacacacagaatctatatggacctcaaatggaactgaagtatgcatttcagtgttcaaaaatatatgcatgtgttgagtgtgaccagatattaatataataaagccttggaaatgtcagtaaact

SEQ ID NO: 2822 - DNA, 401 bp, Homo sapiens
ttttttttttgttggttcatcacaaccttttatttcacaatattaatagtaatcattatagctaccatgtattaagccttcaccatggggctgttaagtcttcattgcttagctttactaaactagataatgtgtttgcttatctcatggatttctcttaaccatcccctgagatccccctatagttcttatccctttacccccattttacagaagaggaaaactgaggctcagagaaggggagtcacttggccacagtcgcacagttggaaagtggtagagccaggatgagacgctaattctgactccaaagctagttatatataataatagcacccaagtaatgtatagattaccatgttttcacatatggcaaattaaggaatcagaatgaatgatgc

SEQ ID NO: 2823 - DNA, 336 bp, Homo sapiens
tttccttcatgagatacttttatttttatctctttctctactcatgtgcttaactggtgaaatgattctgtagaaatagatccttctgattctgcatctcatttccttatggcaactacaacaggaggaatccagctggaaatgccactaaccccacaatccagcacctgagagaggaagccagtcggagcgccgtgctgggctcactcactctggcctgcgcactggggttgtcacatccattttccactggctatggggaataatatttggttaaggctgttgaagcccttgcttttgaggttttacattatttggtaatgaaagccgtttttt

SEQ ID NO: 2824 - DNA, 290 bp, Homo sapiens
tttgtttctaaaaagtttattgtaaaattcaaagcttcaacagcagcatcctttagaaaacgaagcattgcccggatccgttttgaaaaagcagcgcagtcggctaagtccttcacgctcctgcaactgtaccaagtccagggcgccgctccttcctgccgagcgcaggctgctgagtcacgcctgcccggccagtctgtccttcctggccctgaggccaacgtcctagcctaggccttcctgggcgagcagccgctccagacacttgcagagtcctcagctcggaccag

SEQ ID NO: 2825 - DNA, 329 bp, Homo sapiens
ttgttttttttaccagatctacttttatttcagaaggaagtttgtattatagtatttacttttgtttatatacaagttcttcacatttgtgtttaaaatgcacagacctcccttagttctcttgttcctgcttaaattagctgttattttacaatacagaaaataccaaaaaattgcagtcctaaatgtatgtataacacccacaatccccgcaatgaaatagtttacaatacttactccatatttacatgagtgtaatagatgctaaattatacatattaacaaactaagcttgaatccaaacgaacgaaatcgtaaataactataaa

SEQ ID NO: 2826 - DNA, 428 bp, Homo sapiens
ttttaggaagaggctgaatttaagacaaagaaaacttgaatgttaaatatttaaaggattataaaagagcagcaacattcttggtctatttttgtaggcaatagatatgaggattaggttctgactggaatcctgagtgtcacggagacagcccccacatgtgacccacctgtagttttccaacaggcatttttccaagagtgagttttggaacattaaattaagagcaaattaaattttctcaggctttgaggggcctgggctgaatttttttaatgtatagagtttagaatcaacgatttaaagctcagtgtcccctatatgggtctaattatgaacatgccactatgtccacattagaattgaactgattttgtaacaagttattttctatgaaaccctggaaggtggtgaatgagggaaagtgc

SEQ ID NO: 2827 - DNA, 384 bp, Homo sapiens
tttggttttcaatgttttatttcacaaattgttcagatttgttcataaaagatatgttacaggaacattttagaaatcaaaccagttctactgaaacaattgcaacaacgtggcccctgttcatgcaaagcacaaaaaacatttacaataaaactttgtacacaggaagtagcaaaatacatcatttttcatagaaaaaagcacacacataaactgcgggctgagtgagcctacagacaatatgagaaaccagcacacgctttggaatacggtagggcaaaactcctaaggaagccgaaaatgttcatcctgtgggcaggagagccaggaacgccgttggcttggtacaagatctttttaaacacagggtaagtgttggtagca

SEQ ID NO: 2828 - DNA, 415 bp, Homo sapiens
ttttgttttttacaaaagtgctcaaatacaatgcttgcaaatgtttggtctcttggatttcactctgctagcaatgggaaaatgtggaaaacaaaaatccttccatgcagaacatccatgaagctaaaattaaaccaaagtagtatactcataccaaaactctttaagagttccttgggtattttgaggattatttaaaatcatgtaatatgtggcaaacttatgccatcatccatggcttcctatagaaattctgttggaagaattgggggtaagatacatatatatatatagtttatttccccttttagaaaaatcctaatggaatatcaaatatattccaaagttgccaatgatatttgttactaaaataagtttggtgcagttactgcatgttccagagcggatttggaag

SEQ ID NO: 2829 - DNA, 328 bp, Homo sapiens
tttttttcacaccgctaagggctttatttcacagatcatggtggtgagtttggatttccagccctcaccacggttaagtcacacatttcccgacacctgctcatttctccagatctgaaacatctcacccaacacatcctagttgttgtaaaccccaaatgaactttccagaagcaaaaacaataacagattcagagaaccctggtcacacctgctgagcagtcccctctactctggttgcatatagaatgcttgtttgctcaaaagagaggcgctctcaacatcaaggcacaaagaaagacgtctccaggggcaaaatgatgacgaa

SEQ ID NO: 2830 - DNA, 352 bp, Homo sapiens
ttttttttttttgactgtataattttaatatttgaaaaattgcatccagaaattaatacaatacagatttgtacaaaaaaggaaggacgtaaaaacttctaatcatacagacaaaaatatgactgactaagcaaagattttaaaaaaggacaggatgtttaaaaaatactgataaatactgtgtaatgctttaatttactgtggcagatacaaaaatcaataattcattaacagattatatatgtaaaaaaagtaactacatgaattttctagctttttaaattaataaaatgtaacagtagtggtttttattttttaaatgaggtattattacactgtaaaccaaaaacag

SEQ ID NO: 2831 - DNA, 503 bp, Homo sapiens; identical to SEQ ID NO: 2128

SEQ ID NO: 2832 - DNA, 412 bp, Homo sapiens
ttttttttagtgctaaaatataacatttaatgtcacattgttgggcgactcccatttactttttccatatatacagtgaagacttacaatagctcacaatgcagttaagaattgcattttaataatctcaaactaccatctaatggaggaaagaataagtttgtcagaaaaccagtacagccattttgctattaaaattttcctttttaataatttatttaaataaggtatttgaagcagtttagaaaaaacaagatttgtattttatttccttgtaaaaatctttacacatgcagacaaaccagtgttaagaaagtattcaccatcatttaaacaaataaccacttaaatagaacagtgtctgcaattttatctgtataaaaataagatacatttttacagaattcacgct

SEQ ID NO: 2833 - DNA, 483 bp, Homo sapiens
tttttacagatgaatcttttatttcatgggtgctgggtatgtggtctttttaagacaaaaattctacagcatggttttactaagtcagattgagtaggtcgcatctctgtgtgccacacagaacttttagacaagagtagaggggaaaaggttctgcaattcctcacagtaaagtactcacacagtaaatccttaacgaaaactactgaactgtgagtatatgctttataatcttatgcacagaaatgtatctattagtacagaaagttggaaaacaccaagattaaaaacagtgctgtaggaaaaattcacaacagtaaacaaattttgctcactcattttcctacaaatcttcagtttattaattcaagagaaactatattaggaatattcggctgatacccctatttcaccacctcatctaagctacactgtattataccaagaatggtggcaattttttccccatctatacaggcactg

SEQ ID NO: 2834 - DNA, 406 bp, Homo sapiens
ttttggtttacaggttatatttattattttctatagtatctaaaaagtaacatatattgttaagactttgttaaaaataactctttacacagctttcggaaggtaactggcaaacaaggtttacaagtaaaagataaacttttcaaactaaaatcagtttgttgtctttacgcaatttacagaagcaagttatgattcaatttaagtatctgaagcagtttccacaataaagcattcccaagaaatagaaaacggagcttagataaagcaccagctgtcacattgtcaccaagttaacactggttcctcactggtctccataacatgatggagagcaggagaagaaagggaaggaacacttagagaggaaaaaaaaaaaaccctgaaatctgaaattacatttact

SEQ ID NO: 2835 - DNA, 299 bp, Homo sapiens; identical to SEQ ID NO: 57

SEQ ID NO: 2836 - DNA, 185 bp, Homo sapiens
ttattttcataaatgacttttacttatcatttctcttgacagtaattcttggcaatgtgcatataacatgaagggaagcataactttcagaagtcatcaaagatattatcctgttgtcctcattttcttaaaccattaaaatattttcatttataaaaattaatctaaatataaatattgacact

SEQ ID NO: 2837 - DNA, 346 bp, Homo sapiens
cagtcattgtatttatttaccagcatttatggcaaatggccagacctgggcagggtggtagcaatgatagattttacaaattaaggcattgttctttatttcaaaattttcatttacctatattttccttggtcttagaaatatgaataatttagagctggcaatactcaccatcaggatataataaacggaggtttctttgtctgaaatccataaaatgtagtaatactctattgtacttttaaaaatcctatttttgcagttggcttcctctcagtgaattagttaggtagttttggtacatttggagggtcataaacatgtcatagaaagagtactggcatta

SEQ ID NO: 2838 - DNA, 194 bp, Homo sapiens
ttttttttttttgctgctaggtaggcagttttattatgctgttacatagagctctttccatgaaaagtgattttaacatgaactgcccattctgcaaagaggaaaaatatgttgaattagttaaatatccaattcaaaagatgttacagtaaaatacatgtaagacttaacaaaaaaaaaaaaaaaaggacaga

SEQ ID NO: 2839 - DNA, 277 bp, Homo sapiens
tttttttttttttttttagttacatagcatctaagttttctgatcactaccaggtaattttcaaccaataagaaaaaggaaccaacactcagctctgtagaaatctaccttcttttagaaacctcaggcctctgcacccctttagacaactcatttacaaccacaaccttccatggcttctcacatgccagccagggcagggtaaaaacggcaatttcttacaccgaaagggcctttttatgtaacaaacagacctccccaaaccacaacttttttg

SEQ ID NO: 2840 - DNA, 288 bp, Homo sapiens
caacaggaaatatcctttcctatatattgtgctattctgtattcactaccttttcagttttttttttttttttttttttttaagttaaatgcttttcagtaatggattctcccaggcactaaactacttaagccaggagtataactacttcaaatacactatgagaacctaaacttgggtctctggagatctgctgccagagtctacttgttctaacctgtgtatgcgcaagatacaccacattataatagttttgcatttgctatcatacattagttatgtagaatc

SEQ ID NO: 2841 - DNA, 459 bp, Homo sapiens
aaaagtatttattatagtaaaggttactgttgtaaaacattagtgactttggtccatatcttatttgccatttgtctttaaaacattttacattatttgcatcataaattgtaatttttatgactatacataattggtttttttcctgacccttggaatgttagtttcatgtaactttttaaaaaattaaaacattgcagactaaatgtactgataagtacatactgaacacatttaattaccacagtaattaaaaagtcctgatctttacttcttaagatgaaaattcattaacttgcaatctctgggatttctctattatccacaatgagagtatgaataatcccttctttccgcttcccactactgacagcctttatgtaacagtcatggttcccgatactgaagtgagtttcagtcccatcatctacaaactcacccgctgtctccaatttttta

SEQ ID NO: 2842 - DNA, 418 bp, Homo sapiens
aaacaaagagggatttattttatttacaagaattctggagaaggatggcggctggtattggcttggtgaaataatgatagggtcaatgactctgtgattctcttggcctttttgtcatggtagcaaagtggctgctgtggctccaggcatcacaccctcaatcaaggtaggaagaagaggcccagggaggtgttagccatgcctgtgtcttttattggaaaagctttcccagaagcccaggtagacttcctcttcaatttcattggccacacctgatcacatagccatcctaagctgcaaaggagactggaacagtgaaaatctggatttacagcctccacagttggagtggctggagatacagagttgggacgacccctgaaaagtgaaccaaggtcgtctgcacggctgccctgga

SEQ ID NO: 2843 - DNA, 428 bp, Homo sapiens
tgactttatgtactggtaatttattgcacaggtttttctgcatcaaaaaagtatctgctaaaatagagaaacagttgtgtctgaattcacatttccccccaacttctaaaaatatttcccctaaaaaagaatccactcatctaattttaaagaaaatatacttcttacacaagacaatccaaactgatgcaaaatatttattccaagttagttattttatgcagtagtttccccctcgagacttgtgataaccacatcttttaaatctgtaaataatgttatcaaaataatcttaatctttgaaatctcacaaaaatttatattttacaatccaccctgaatatcaaggctgcaagaataacacaacatttcctatatccaaatattttacagctgtacccaaaaaggaaaaagaaaaaaaaaacaaa

SEQ ID NO: 2844 - DNA, 365 bp, Homo sapiens
tttttttttttttcacgttttacatgtacagagtttatttgttgtttttacttaaaaagatacccaactgaaatattactaatgattaaaaacaaattcagagttaattacaaattcagttgaaacaaaatttcagtttggattaaatttacactgtgaattacaatgaagtgtcactcaattgcaaaatgatttccattcatacagcattttgtttttcataaattttgacctctgaccaaagaaaacacagctttttgggtaacattcatgaaaacattgaagcctataatataaatttttattaccactttcaatagtcattaatataaaaagttaacaaatttaaacaacaaagtttaagc

SEQ ID NO: 2845 - DNA, 288 bp, Homo sapiens; identical to SEQ ID NO: 2132

SEQ ID NO: 2846 - DNA, 466 bp, Homo sapiens
aggatgatttttgaagaaccagtttattaagagattacaccaaaagcataaacaatttatacgtcaaactccgactgaaaaaaaaataaccgataaggatgttttttaaatgtactgtactcacaaataacaagacaaatttgacctgttcaataaatagaaatgaagtggctaaaaatgtttaaatggaaatggaaaacagtcgtcttctttgtacagttttgaaggggtgccccctattcacgcctacacgtagaaaaaccctgacaaaatcagaggttcacttaacactccaaccatatgagcgtattaaggtttcttttcagatcttaggagatcttgtccaccttaatcccattcacagatcttaggagatcttgtccaccttaatcccatcataaagactgttggcatgagttctgatgtactgttttaatatgctgagtactgttgattcaacaacaaa

SEQ ID NO: 2847 - DNA, 419 bp, Homo sapiens; identical to SEQ ID NO: 1546

SEQ ID NO: 2848 - DNA, 487 bp, Homo sapiens
tttttttttttttttgttaagacaggaaacacatttattgagagcacagtggggtgcgccaagccctgtgctttggaaccgcatcacagcgcccctcacaacagccctgtgaggtaggtgaaggagcccacttcccacatgcagacactgaaggctcaacagctcccctaggcctcagggttcctgcggggtgggcaggggtccagcccacgggtctgaccccaggtcagcggcgtccatcagtcagagggcgggtctctactcaaggggaggccccgggtccagagtctctgggtccagcctgtcccgtgggaataggtgcagggtgtccccgtggctgtggagggatttcgagctggagaggggctggggtccacattcgaggtcccttcccacgtaggcatccaggtgatggcttccgccaaaccaggaaggagacgagaggcccgccaggaagaagacttgggtccgggatggtgggcccatc

SEQ ID NO: 2849 - DNA, 380 bp, Homo sapiens
cgttatcaatttttatttcctaccatacaccaaatgtacagcactgaacacaattttgttgctttgatgtaagaaatattaagtgtttggagaaacagtatacaaacaaactacctcaaattaaaaaaaatgcatacatcattgcctttctgtttacaaaagacccaatttacagtattgatcattaacatagttgaaaagaaaacaaattcagtgcacattacaaaacacatcaagtacaaagtaggcaaataaatacaaacatacttcacaaaacatcctgctcaaactatgcaaacacaaataaattaacctgaagtcatagcaaattatagtaataaatatgtmggttggtaagagatttcttttaaattaaataa

SEQ ID NO: 2850 - DNA, 380 bp, Homo sapiens
gtatttatttytyctagaaaaagaaatttttscaatagaattttattaacacctttctcaaacaaggtttccatgacagaaatcttgacagcaggvgcactagattttyttttttttttaacatgttctttaaaacactgtgaagattaaaaaacaatcttggcaggctgatggctgcgtcavvacttccgggcctcctgctctagggggcatcaccagtattttgccaccactgagccagtcctcttggtagtagcagtagaaatttaattatttgaaatgaaaccagaaacatccctsgcaactaacctagttttcttatcaatgcattaatgaacattcttttaataaaaatatttaatacaagvcacatttbgctg

SEQ ID NO: 2851 - DNA, 316 bp, Homo sapiens
agttccatttatttattttttgccaggcgaaattttaaaggaataaaaggcaaaaaagaaaaaaagaaaatgaagaaagagaagaaaggaaggaaactttgctctcttactggtagacaaacttgcaagaccagcacaaaagaaaaagaaaatttctttttttttttttctactacattaacaggactcaaattctggaggaacagaaagcagactatatgtgcaatgctagtatctgtacattacatagaaattgctcaacttctttttctgccattagttttatcatcagttaatacagcaaatcataaaatat

SEQ ID NO: 2852 - DNA, 250 bp, Homo sapiens
  misc_feature (1)..(250): n=a,t,g or c
gcattttaataaacttaatttaatgaagcgctgcattccacaagtacagtcagtacagtagctctcctttgggatggaaaaattacaagaagcaatgccgaggaccgtgaactgtatacagaagccttgtggatctagaaaccaacagtgtgtgaacttaggacattctcaagttttaaaacgtggccattataatatcatcacattacataaatntcacatcaccaatattcgttttgtttttttcttt

SEQ ID NO: 2853 - DNA, 322 bp, Homo sapiens
  misc_feature (1)..(322): n=a,t,g or c
cagtataatggcatttattatttattgagcacttattacataacagatggggctctagatgtttcacatgtactttgtactagtttgtttaatcctacatctactctatgagatacatattaacttccattttacagatgaggaaattgaggcacagaggttaaggaacttgcctagggtcacagggtagtgctagccagggatttgagcccaatctgggcatgtnctcataattactagactatatactgcctgccctggtgtgagaagagaagtaaggcataaagtagaaggaacaaaaagaagagaagtcataaaagag

SEQ ID NO: 2854 - DNA, 396 bp, Homo sapiens
  misc_feature (1)..(396): n=a,t,g or c
aaaagaatntnattttatttagaaggtaaagcgttaagttaaggcagaatgatatacttttgacagtgagtaagaaaagttaattgttagttcatgtcaaattagtggtgtttggagtgggttgatgcacatttcattaaccagtaagcatgtgtcaacttgtttaaactacattttaaaagtcttctatagaataaatgtttcctgtctcactaagttaaaatatacaaacaaggggacagaatttgtcattaggttttgaccnaaaagganaaaaaaaactggcttcttggaaacttacggggggatccccgattttctcaattaccccttgggggggggctttcctatggncggggcccccctttggcaaaatttngggggggnccggttntt

SEQ ID NO: 2855 - DNA, 318 bp, Homo sapiens
  misc_feature (1)..(318): n=a,t,g or c
gcaatttgtaaattctggtgaatactcaaaattgtagctaaaaacagctatctgaatataggtttaaaacctcaaagacacagagctaagaaatatggaatacattgtatattgctttttcaatagagtagacataaaattgatgacaaatgtttccaaaccctcaataagaactcaaaacatcatactatgccaagctgaattacagaagggtatctaaggaaagaaggacagtggcatcagttatctctaggataaaggggccagtaaaatcaagttggcatttgatgtatacatcttattggggngtggtttttc

SEQ ID NO: 2856 - DNA, 441 bp, Homo sapiens
  misc_feature (1)..(441): n=a,t,g or c
caaatnttttttattgctattttcacccttaatgtatctttctacatagctttctcctnttggaacagtaatacatggggcagtacattattttcataaccttatgccatcaaatcaattaatacagatgcttgacacatttaattatacaaaatcaatttgcttcaagatacaaaattaatgttgatatgtaattaatgaaaaaaataaggatgttaaaaagataactataagantatccagatatatgctgtattcccacttatataggatctgatcaataaaacatcaacacattcacttaggatactggatttaatccagggatcagggccatattttcaaaggtattttaggggtgccgggggcactggcaaaggnggggggaaaggnggctgagggggacnacctatggnttgcttaaaccagggnccctggttt

SEQ ID NO: 2857 - DNA, 402 bp, Homo sapiens
tttttttttttttttcttagttaatatctttaattttttatgtagaatatactatttttttctccaccaaaataacaatatatttgcaggcgggaacatgtatgattttaaatgcacttttgaaatcttagagtagaaccactactctagtaatacttgtaataaaattaaaatagttttaaacacttccataaagaattaggggtgcccagctccttgatttccccctagggataaagatatccatgtacaattccagggagcttccctgtaattcctcaaaaaaggcactagtaaaactcttaggagggatattaggataaaggctcacttaggcaatagccctttttccccacatattctgggagggttctacaaaagctatttggatactcattccgg

SEQ ID NO: 2858 - DNA, 367 bp, Homo sapiens
  misc_feature (1)..(367): n=a,t,g or c
taatacaatcgtagtacagntatgaagtcacattcaatccactgaatatattcaaggtattaataaaaatattatacatctttattcactatcttaatataattaaagtatttggttcttataggtaagattaattaccatattcattcatatatgcactgctagtcaaacaacatgggaaatgaatgtatgggattatgatagtgggggttcagtcctttttgatctgaagtctaagtttcaaaagtgaatgttttcttttttaaatgtcacaatatttggaatcctaggaaaggaatagggccaacctaatttaagggcaagggtattggaaaccttttataccaaccttttaattttggaaaaa

SEQ ID NO: 2859 - DNA, 284 bp, Homo sapiens
gctcatccggctgtgtggccttgggaagggcaggaacctctctgagcttcagtttcctcatctacgcaatggggctgtgcgagaacacaagccgttcatggagatgccactcctcaggtggaggctgccagctctgggctttggtgccagctgtcatttatgggaagagcaggccgccctgccctgggcctcatcagccccagcaggcccctctggcttcctcatggggccgtgtgaccgcaggggctttcctgacaaacatggggtgcgagtgttccagggga

SEQ ID NO: 2860 - DNA, 472 bp, Homo sapiens
  misc_feature (1)..(472): n=a,t,g or c
ttttttttttcttttcccgtaactgaggaaacaagtacacatatttcttaaacaatgataaatacaatctgaatgtataatggtgtcaagtttgataacctgttgtatccattctacaataaggagacacccaccaaacagatattcccatcggccttttggggaatgttctctggaaagctcttaatagatgtaccttctaagtgctagaggcaatgttaggatgctgaaggacttatagnacaaaaacgtttcattctgccgataaacttggagtatggaaaatatcaagttaaccaactaggctacatgctacaacagagtagggcagagcgtgtttctgggctacacccagatctaggttctaaaaatnaatttcctaaagggagggtacttctggaatctaacctctgaagggtattacaaattttatncccagcaaaggcaaggttaggtgttgtaggtggggacc

SEQ ID NO: 2861 - DNA, 307 bp, Homo sapiens; identical to SEQ ID NO: 1737
  misc_feature (1)..(307): n=a,t,g or c

SEQ ID NO: 2862 - DNA, 333 bp, Homo sapiens
  misc_feature (1)..(333): n=a,t,g or c
gaaatcatttnntgntctttaatcatagcaaatgtgtttttacggtagtcataaaatcaacattaccacatatacaaaggacaagacaccagtttggcatacaaaaataccatatattaaaattgggttcattggaaaactcaggactggctaagacaccatctataacagagagagcaagcaagantgcttttaaggacattcagatttataaacaggcagcttgatatcccctttacgaggtcaatatttgggcaacatttggggccaatatttttctacacagcccggcaggctcatttatctgtagggggctatttgggncccttaaaa

SEQ ID NO: 2863 - DNA, 421 bp, Homo sapiens
  misc_feature (1)..(421): n=a,t,g or c
tattccacaaacaagttttcaagaagacatctaagtgaacactgatacaaaacaatgaatggacatccatttgcaccaggtcttggaatgcattcagaggcagaggcttccagtttcacaagttactcagacattcctttagccagggctgccccagctccctcacagctgtcttgtctgtcactgggcgccagacctcctgacagaggcttccttcacttcagcctacctgccactggttatcgaggtgcttggggggtgcctgctgtggaccacgagggacttgccctttctccttccccaacaagctcctggggctgagtttgctgtcacagcatcccctccctttcctgaaggcatgcgatgggtttggnatgggccagatgtgggcagggcacagggacagctgggggccgncagc

SEQ ID NO: 2864 - DNA, 446 bp, Homo sapiens
  misc_feature (1)..(446): n=a,t,g or c
cggataccctgggggcctctgctcctctctttgtggagacgtcgtttcaccggcggcgcgtgaccccggcagctgtccagagacccagagatgtccaatcacaggcgcacggtgcacaggcgcgcagggctgcctggaacgggcccaggcaggcagtgaccgggacctctccggagggagaggaacggtgccctcccgggaggagctggccaggcaggcgctgcccagggcggccttccctgctggactacggcattgcnactgagttatataaagacactatttggggaaggacagcgggtgaggactnggcgcggcggcacacgctttgcctgttgtnttcagctcttctgggggccaaggcagggagttccagggtttacagtgagcctgatngccaattgctttccaaaagagagaaacagagagaaagggattnaggcttc

SEQ ID NO: 2865 - DNA, 343 bp, Homo sapiens
gattgggcccaggacagcagctgctttgtcaccaactccggggactatgagattctgtactgggacccggctacctgtaagcagatcaccagtgcggatgctgtgaggaacatggaatgggccacagctacttgtgtcctagggtttggggtgtttgggatctggtctgagggggcggacggcactgatatcaacgctgtggcccgctctcatgatgggaagttgctggcttcagctgatgactttggcaaagttcacctgtttagctacccctgctgtcagcctcgagccctcagccacaagtacggtgggaacacagcagccatgtggacaaatggtgggc

SEQ ID NO: 2866 - DNA, 440 bp, Homo sapiens
  misc_feature (1)..(440): n=a,t,g or c
taaaccatatcatatatatttattttagaataatcactgaggtagcagggtagaagatgcattgnaaagggtggcaagaaagagggtactgaaaacaaagaagaagataatacaataattcagataggagatgactgggcctgaatttggctaatagcagttatgatggagagcagaggagggatgcacaagatacttggagatagaattagcatgactttgtgtaacccttgtaacaatcaggttcatcctcgccaaagacttactaggtaaggggacattctgtcctgtagtttatctctcaccaatttcaagaaaagtgaagattttacagataagtagaagagaggcaagtaggacaggtgccccccaggcttttaaataatgtgacctngaggcaggcttggaaggaatcngggaccattcgagttttttaaaaa

SEQ ID NO: 2867 - DNA, 430 bp, Homo sapiens
  misc_feature (1)..(430): n=a,t,g or c
aatacagatatttattttctcactgttctaattaaaatagggattagcaggtttaattcctggtaagggctctcttggcttctccttgtgtcctcatgtggactttcctttgtgtgtgagcataggaagagacgtctctccttcctcttctcataagatcaccatttgtatcaaattagaatcacattcttatcgtcctcattgccctatgtccaaatacaatcacattgcaggttaaggggtgaattctggcaagttggagttggggtggggggtggcgcaggggttatataactccagaaatctcagtcacaagactctttacctgtccctaaacatagatatattaagttggccatnaaattgaaattccttcaggacatataaaaatttnaatgggtggagggacaagcagaaaaacaaggatgaa

SEQ ID NO: 2868 - DNA, 549 bp, Homo sapiens
  misc_feature (1)..(549): n=a,t,g or c
gcacaacacaaagagtgaactttaatataaactatgaacactgtagctaataatgaatacaagttcatcagttgtaacaaagtgccatgctaatgcaacatgctaattagagggggaaatatgcaaagaagaggagggatatgggaatccctttgtgcctaatttttctgtaaacataaaactgctcttacaaataaagcctattaattaaaacaacaaaatacaaaacaacaactaaaaccaaaaacagccaacacccaatgggttgagctggagtaagaacaggctgcccagcacacttcctgggccactgagccctgggctngaaaagcaaaagggccagtgaggtttggctgggactcagctccccagcctctggttcaagcccgatttacgaacacaaaggtcatctggttggatttcctggtcccctcagctcactttaaggaggcttttctggtccacagctttgggttgccaaaagcaatctggctaaanggatttgggacatccggctggtgaatgtagggganggtttacccttagatg

SEQ ID NO: 2869 - DNA, 601 bp, Homo sapiens
  misc_feature (1)..(601): n=a,t,g or c
tgtgtcaagccctgttctagaagtgggaagaaacaagtgaggaggaagggagcagttagaggggttcagagaagaccaatgtgaagagctgacatttcagctgaaatccaaataacaagaaagaaaacagccttgataaatctggacacacagcgctacaggcacaggaatagcatatgcaaaaatcctgaggtagaagctagcttaatattttcaagaaaataaagggaggtcactacctaaaaatcaatgattgtgggggaaatagggctcttgaaaatgtcaaaaagtttgacaaggtccagctcctggagggcttggattttattgtttggaataggaagccataggaggattttaagcaatggagtgatttcatcgaattctcagtagaaaaactattgcactggctgcagatgggaaaaaagttgaagggaagcaagagagtatacaggaggtccatcaccccagggggagagatggagagatgggtggcttagatcagggcaggagaatgggagatgggggagagttgatggacccaggatacatgtttgaggtaagccgatagantttgcccaaaagctttgagagaagatga

SEQ ID NO: 2870 - DNA, 402 bp, Homo sapiens; identical to SEQ ID NO: 2166

SEQ ID NO: 2871 - DNA, 432 bp, Homo sapiens
  misc_feature (1)..(432): n=a,t,g or c
aggtttcaagtaagtgacttttatttttctctgacatttcacagtcaatttctgcaaaacttcatactttctcaaaagaattcacatttgctaaataaatttctaccctaaagaattcatagctgaaaaaccacttcaatatatgcacaaaagttacttttctgctaaaggaaccatagtagaaaataaaaagtcagacaatactataatcaataaaaaccaatgagtgtaataaattacaaatgtcattaaattccattcccataaccattgcaatcagcaacttttctatatatatttcaataatngccaacaaaatctgccaaaagttctcttaagggttgctctgagctaaaaatggcttctcaccttcagaaaacagcagctctgccacagtacttcatagccaattacgttattcatcgctaaaac

SEQ ID NO: 2872 - DNA, 450 bp, Homo sapiens; identical to SEQ ID NO: 196
  misc_feature (1)..(450): n=a,t,g or c

SEQ ID NO: 2873 - DNA, 175 bp, Homo sapiens
taaaacaggcttactttcaacatccatttacaaacatttgttgaaaaatattttaggagtatttgtttaaacattattccgaatttactgctccataaagcctagtgaatatttaaattcttgaatatgttgccagaaaaagaagcagagatccaaaaacaagtatatgaccaga

SEQ ID NO: 2874 - DNA, 395 bp, Homo sapiens
  misc_feature (1)..(395): n=a,t,g or c
tcagaaaactaaagcagcacctttattttatacatacaaacagtataaaatgtttattaggtaagagctgtgttttgtttacaatatattatattgcttcaagccaatgcaaaaagttcatacattatattccctatttcattgtgtttagaatatattatattgtttaaatgccantaccacagtgtaatttttttttttttaatactgaatctctggaataatggtaaggtcaaaatatattgtattgagagtttaaaaattaagagcaatttttaaaaatgtaacaaacatctaaatatctgacaataaaatctgaaatgctgtaacttcaacattaactgcaccatccaaattcttgtgacttacgcattttgccccatttaacctttctg

SEQ ID NO: 2875 - DNA, 373 bp, Homo sapiens
  misc_feature (1)..(373): n=a,t,g or c
tttattcgtggggcttttgtacagagtgggctgcagcagttcttgcaataggcagtgagagaaatgaagttctctctaggtatgtccgtgggggagggggttggtgaatggaatttatatgagggtttgaggaatctggctcaggctgagtccagtttctttctgtgttttgagcaacaacctagttactgtcatctgtgcctgggaacgttcatggctatggctcgggttcaagtctgcagaggaaattatacagttggcgaagtcacagagtggccaagggactctgtttctcagtcagcactggggantgaaagtgggaaaggggaagcaggggtacgtcacaacctccaaaatcagggtgcccagccgc

SEQ ID NO: 2876 - DNA, 285 bp, Homo sapiens
  misc_feature (1)..(285): n=a,t,g or c
tatttaataggaatttgtgttagttgtaacaatgtgtgtattgganccnaaacatgttatattttaagcaatggcttggagagaactaatcaattcatattctgcatttccagccaaagggacataggcacaactgactggtggcaccttcctgtgggaagcctcttccatccatctacagcattgatacttttataaagtatgaatttatcttgcttgaagagttaagtctcatttnccatgggntaatgcagggttgctccatacccgcttngcattntcccg

SEQ ID NO: 2877 - DNA, 394 bp, Homo sapiens
  misc_feature (1)..(394): n=a,t,g or c
ttttaaaggcaggggtaaatctcaggaaagcagaagttacagtcgaaagtgtaaatcgacagttggaggttatacattggtttggcctaaaaaaggtggaatatcttgaagcaggagctcacaggtcataggtggaatcaaaaattctctgatttgtgactggttaggaaagtgaagctttgtctgaaatcctggggtaagccgaaaggaatgttaaggtctggcccgtgnatgacttcttccagggccttcaggaagaaatttagaacaaaggagggtngtcagaattcagtcctcagtttcccccatctgaggnccacgtnccagcngattcatttgggtgggggctctaggtttatttttaatacaccctcagagctnccaaanttggaac

SEQ ID NO: 2878 - DNA, 195 bp, Homo sapiens
  misc_feature (1)..(195): n=a,t,g or c
atatcaagtgtnttttattttcacaaatattttaaaatgcagctacctttgagccacaaaaggaaaaagcagtattccttttatgtatttgatacaaatattaaacataactcagttttagttcattagctcagctcagtgaaaatagctcaggaaaaaaaagtcataggtaatgctattggtatatgcaggaaa

SEQ ID NO: 2879 - DNA, 289 bp, Homo sapiens
  misc_feature (1)..(289): n=a,t,g or c
tttttttttctnaaggataatcaataatttatttctctttaattgtcacaattaccataattatctagctacatgaccaatgtcactacatatcacaggangattgtccacctacactttactgagacaaagacaatggccatttatgtgttaaatgtacaatgggatgttaacaccatttatgtgttaaatgtacaatgggatgttaaaagcagtggcttttatgtgtaagncaagatgtggcacatgatttattacggacaggtttgatttaaaatgtattntgccc

SEQ ID NO: 2880 - DNA, 378 bp, Homo sapiens
tttttttttaatgtttaccttttaaaacatccaaatgtttattttcacaagcttagtagtacaagatgcaacataattcaagaaaatcaaccacagtgctaatactttaatatattattccaaatattagacgttacagtttaaatctttttaacattagctctaatgttggaataacatttaagttaataaataactgtgaatataaccatatgttcagtctattctccccagtttatcctaaatgacaattttattgtgatttgggtcataaaagtgataaataattgtttatatgttttcataaattgcatgtttatttaattaatcctggaagaggaacctaggaaatacattccatggggttacataaattcg

SEQ ID NO: 2881 - DNA, 464 bp, Homo sapiens
  misc_feature (1)..(464): n=a,t,g or c
ttttttttttttttgaaaacagaattatttattgcatacagcatgggactgtgatcaacctggncatcaaatgccgcgatggctgacagggcccaggcggcgggagtgctgggaagcccagtacacgtgctccctctctgtgggactccgggatccacggggcggatggttctntgagttgcgagttgttcctgtttgtcttccagcccccagtcctccccggccactctgattagccagcctagggtagggcctggcataaagtcacacaggcaaaccccagaagaaggaaaaagggcacctgcatgaacaaagagttgggttgcagaggntgcaccggggtaagacttccttcatgcagttnggagtccncccatgtngggacatcaggagatgncaccncacagaattggtngctaggttttnctgggttttggcccagagaggctnattcccattntttt

SEQ ID NO: 2882 - DNA, 318 bp, Homo sapiens; identical to SEQ ID NO: 1559
  misc_feature (1)..(318): n=a,t,g or c

SEQ ID NO: 2883 - DNA, 363 bp, Homo sapiens
  misc_feature (1)..(363): n=a,t,g or c
ttttttttttttttttattatatgaaaactgtttattctatagcctactgggaattggccagaagttagaaggacattggaaatgacttttaaatctccatttgagaaaaagcatgccatgagtctaaataaccaatttcatttagcaaacaaaatacaagtaaacaaaacacaacttctctgatgnaatgaagtggttaccatattttttcccattgtgtaaaggatagttctcatatggaaatatatcacctaaggcagtagttaatcaggaatattctggcaaacttattggggggtaatttaaaccccaaatcgggaaggnataggantaaaaggacattaaaggtcttttctttcaaa

SEQ ID NO: 2884 - DNA, 342 bp, Homo sapiens
  misc_feature (1)..(342): n=a,t,g or c
tttttttttttntttttttttttttnctgggctcataaatatgtaataatcccctctcttggcagagtccagaatagaaaggagatacatacaacccagggcacaagctggagagacacatcatctagctcataggcccagagatatgtgataatatcccctnttgacagggcccaggnagaagagtcacattcatatgattctgacgcagtgatatgtaacaatgcacccntggaaaggattttaaggattaaagtntcaacacctggggtactaggcccagtgatntgacacantctcatcatctttgagggtgacacctttaacttttaggctgagtgt

SEQ ID NO: 2885 - DNA, 376 bp, Homo sapiens
tttttttttcagcaattgccagttccttatttatttcttgaaatgaatgaactaagaaaaaagtgccaattgttctttccagagatcatgcattctgatagagaagatgcaggaatcccttttctaaaatgtgtctgcaaagctgcttgctccagagttgagcatgtgctgctcaggccacctgggtgagggtagagggcgtcttagttagacatatgtatatttaaaaatactccctcaccccatgacatgcatggcaggaggcccttttcttaaattttttttccggggggtgataaccactatttaccactttttatttcaatatctgggggtctccttgctctccctcttttgactgggtgtgtgtgtgtgc

SEQ ID NO: 2886 - DNA, 482 bp, Homo sapiens
  misc_feature (1)..(482): n=a,t,g or c
ttttttttttttttggtgtctaatacttttacttcccagcagcataataccactttggtcaggttgaaccactgcacaattttgcagctctttcagaaaaataatgaaaacaattggaaagacatgatgtacatgcaaatggtgagaaaatgatactattgtccaatcctttcccgtaaatgtaaaatatccttagttcatctccaaactgtgtatttattataagcccttacatcagggattttgtttctttcagtttttgtagcaccaaatagacacagcggctaacaagaaataaatctgaaaagtcactgaaatatttatcacatgtcaggaaattttctggtctgtacctttaaccatgttcctgggcttcacatattcttcttaagngtaagctataacataaggttgagttcccacccgtgtttggctaccgntgtggtttgtttacctggataatactttgttaatatcctttg

SEQ ID NO: 2887 - DNA, 420 bp, Homo sapiens
  misc_feature (1)..(420): n=a,t,g or c
tttttttttagcttaaagacatgaaaaacccagtgagtttttattgaatagtctctcttgtgttaaaagtacatattcaggactatactatgttgtatttggaaatattctgatgtgtttaatacaaattcgtagtgtattcagagcattgtatgtgtctcaccaatggtacacatttggattaagcagtaataaggcctataaaagaaggaaatgaaacaatagttttcaacaataaatggcagggaaggaaaaactgctggatgggncccaactgaggaaaatgtccttttacactatcccttgggtgggtcaggtctccctggaatctgggtgtggcttattaattgctgggggaagggcaggtgttaaacctgtgggcccattccnctggcctgttctgggggggggccncagccc

SEQ ID NO: 2888 - DNA, 336 bp, Homo sapiens
  misc_feature (1)..(336): n=a,t,g or c
tttttttttgctgtatctttctttattggtttggggaaaactggagggggctggaaggccatgaccatgacacaagcaggaccacccacactcagcgacacacaacagccgtgcaggaaagacagcccctgaggcccgcctgccagcaccccctcggcttttggcggggcngggggggcaggggcgggagaggcaacaggggaggggagccantgcccccaggcaggcagagctggggacaganttnggggtnccccattncaaccccagcgccatgccaacaccctcaaatttcaaaatccagcagaggccagncccaggggnagggnttttggg

SEQ ID NO: 2889 - DNA, 397 bp, Homo sapiens; identical to SEQ ID NO: 2193

SEQ ID NO: 2890 - DNA, 333 bp, Homo sapiens; identical to SEQ ID NO: 2196
  misc_feature (1)..(333): n=a,t,g or c

SEQ ID NO: 2891 - DNA, 357 bp, Homo sapiens
  misc_feature (1)..(357): n=a,t,g or c
ttttttttttatgagtaataaatatattttgctttattttcaatttgatatatggaaatttcatcagaagacttgactgcagtgttacttacaacttagaatgacaaaaaattcagctctctggtttttcaaaggtaataaagattatactaactcaatggcttaaataagagcttgttaaccaaacacaaatattttactgacaaactaggaatttaggtattatgaaggagaaaacaattttcacagacacccactctcttagtctaagggatgaggaatttatttcaaagttatacaagtgccaaagganatagatctaggaggcagcnggggtttcaaatgagccaaaaatgg

SEQ ID NO: 2892 - DNA, 364 bp, Homo sapiens
  misc_feature (1)..(364): n=a,t,g or c
atagtcaaagtngcagcagctcatttatttagccaaaaatagatactttctcgtacaatttggttcacacatatgtacatttctctgtatatatacacacacacaaaggcagacacgtttattctcactgaaactccaccccccaaaatcaaccggacaaacaaacctcacagcgaatggngngtgccacagaagcgacttggggagggctgaggaggactggttttatttctttttcttactttctttgtttagttttgcttttagggtatttatacacgggacatgcttacaagttgtaactatacagnggcgattttttttatacaattatttacaacggtttaaaaaaggttttttttgt

SEQ ID NO: 2893 - DNA, 551 bp, Homo sapiens
  misc_feature (1)..(551): n=a,t,g or c
ttttttttctgcctctatattttaattatagtctcttctgtttataaacaataacttacacatatttttcatagttttaagtaaagattaaataatgccatcttagaaaggatctgtttaacctatattataaaagttagatacacaatttggtacattaaatgaaaatgtcatttgcatatatagaacctgttctgttttacacagtatcataatagctacagctactacaagaaatatggttaatggaagtcaaacatttagtacgatgcttaaagagttactttaataatgccctcttatttttctagttagatagcaactatatttcccagacaaggcaaggaaaatatatgggggccattttttataaatttaaaagtaggctaggcacaatccaaccacggcaactttttttggaaatagcttgcaatgctatggnttccaaagtggtccaggtactgaagggcaaaatgggctggataggatgggaatgtaggccagtgggcnggtaggctctaggntggatttgttacnggtggtntttagcc

SEQ ID NO: 2894 - DNA, 392 bp, Homo sapiens
tacaaaaaaatgctttatttaaaaatatgatctttttaaaaaggagacttttatacacacttactttagaaacagtcaaaaacacaacagaatcaatccagatttagaaatgatgatttgtaacatacaatattggtatgctgaacaagacagtttaaatgtatgattctttttgtcccttcacatttcaataattcacatttgttaaaactagtggttggggactaaagaaaaggtcatatctgaatcctttccccttcaggaaatctgtcacccttctggggcagttacaggaaatgggcaggcagctagggcaatgtttgtatttctttgggggtgcctctggtggtccaaaaaatatatctccgcttttattctttttctatggaaat

SEQ ID NO: 2895 - DNA, 386 bp, Homo sapiens
  misc_feature (1)..(386): n=a,t,g or c
aattatatnntacatttattcattcagtaaatgtgttttgttagttcatgtcttttattaactcatacacaattaattgtcttctggtttgctgaagcaatgagacatttgtcacaataatgtctgtcaaagtggctggccataaacgctccagtaccacattcatctgaagagcactctagatgaaggcgacttattttgccattctcatccaccttacagtatttcaggacagccagcttcaccttctttcgcttacggcttattcttctcggggtgggtgtaaacattcaggtaaaaaataattgaatatctaaggtgccncggtactgttcccggtactgnagggtacnataggngggattaaaacngggcggggtnctctt

SEQ ID NO: 2896 - DNA, 436 bp, Homo sapiens
  misc_feature (1)..(436): n=a,t,g or c
ctgcaaaggcataattnaaatnacgaggtcccatgctgaggttctgggtggacatgaactcgtggggggttcctcgacccagagcacccacattacgacgacaacaaaatctcactgaagtaacccatgctcctcgcctttctcctgcccgctagcatgcccccggagtccccaagatcctgggtggggaaccgcctgcacctgggcgttcaagcgggcaggtcccacggagcaggcccagggctaacgccgaggcgcctgggngtgaacctttctttgaggtcagccctctgtggcaatttcaacatcacagagtcgtttcacggagctgggccagggattcgtgcttgcttgcggcatggggatgggaccggctcttggcggccgagcaaaggtgctgagtttgcaagacctttgttgccnggcgtctnttctt

SEQ ID NO: 2897 - DNA, 519 bp, Homo sapiens
  misc_feature (1)..(519): n=a,t,g or c
aacatgaagatcactttattttcaaggagtaaggggaatggtaatggggtagatttaacagcaaatgaaccactgcacaaaactgaaaggatttctcctatgacatttagtttcacttcttttccatttaggacactagctgctgtaatctcggtactacttttttttaagttatcttccccaagcagtgttacaatccagctggaatgggcattagatatacacatcattagactcttaaaaagaggcccgatggctctcgatttaaccagaatattaaaaaagaaaatatatgtacacacatataaatatatttaagttcacacttttttattttttatttatttatttatttattgagacagggtttcactctcgttgcccaggggtagagtgcaatggcatgatctcggctcactgcaacctccacctcccggggttcaagcgattttcccacctcagcctcctgagtagcttgggttgncagggatgtccaccacacctggggtntttttgttt

SEQ ID NO: 2898 - DNA, 401 bp, Homo sapiens
  misc_feature (1)..(401): n=a,t,g or c
acagtaccatagtattccactgtctagtatactataagtganctatataccaataatgaatacttaaggttgtttcaaatcttttattattagaaaagtgctgccagaaacatccttgccatgcttctgtatgtactggtgctagtgtttctatcagataaatttttagacatgaagtgaattactaggcataggnaatataatttacacttttgatagatactgagtttttgctcatttgctacatgaagcagaggcagagtattctgtgtggggtttgggacaggaacactgacccctgaagtcgagccggggggtctaacataggtgggtcatttgtccagcctgttttatgggaagggaactgggactctgagctttggggggaatttcccgcaagg

SEQ ID NO: 2899 - DNA, 252 bp, Homo sapiens
  misc_feature (1)..(252): n=a,t,g or c
nnnccttattttccttcaaaaaatagtttattctgcacatttcctagtaggctctctgcccaccgttccagggtagcagctactcataacttgtctttctctccaaaaccaagagggccttcccaacagaaaaaccttcagttcccaaagcagcatcgattcttcccctcaccccagcaaacctcggggtgggaataatgaatcattcaccttctcccacccctcactgccccgccccaccttcatttgccg

SEQ ID NO: 2900 - DNA, 319 bp, Homo sapiens
  misc_feature (1)..(319): n=a,t,g or c
tttagcggtctgccttcatcttttaatggccggtgcggtacagttagtggacagacgggggatgggacacagcaggggtgaaacagggcagtcacagccggggccggggatctggaagcggggggggtcctccccctggaaacaccgtctctggaaggacacccttaggatcccctgacctcagggtgccacccacacgggcctggtgttctgggagggccgggctggagtgaccccagcccctccctacgttccagggacccttgggtctgtcgagtccccttggtggatgagggtcaagacctaggtcaagctgact

SEQ ID NO: 2901 - DNA, 461 bp, Homo sapiens
  misc_feature (1)..(461): n=a,t,g or c
tggctaaaataatggtgtttattttctttaaatacacttaaatatgaaacatcagatggtagttcattaaactggaagactataagctggacagtaatcagaaagtcagtactgatcatacgaatcaaattctgcataaaaaagaatcagaataattcacaagagttgcgattagaaaggactcagagactacagttttcctcatctgctctgagtaatcagtcatatgacacctgccattccatgaccagcacacctttctcattcaccaaaaaacaaaaacaaaactaaacaaaaggnttacatggggtcccctcctctccattccttgggtgcgcagaggcatctgcagctaggagggcatccntcaatgaccgggggctccttggctgggtgtgatgggaggttgggcttggattcactgtggggctgtgtnaatggggttttttttttacactggg

SEQ ID NO: 2902 - DNA, 537 bp, Homo sapiens; identical to SEQ ID NO: 1788
  misc_feature (1)..(537): n=a,t,g or c

SEQ ID NO: 2903 - DNA, 434 bp, Homo sapiens
  misc_feature (1)..(434): n=a,t,g or c
ttattttacaaccaacaatatttaatatttccacattgaagaatagatgtgataattaaatcttttataaggttttaaaaagacatgaaacataaacctaattatacataaaagaaaagaattttaaacaagagcttattgtgatgacattactcataacttttacctttaaaaccttttcttgggtagctattcaaaagtaaagaccacaagttttgttgcccagatttcttatgttttgtatatttaagctctttatttattgaacagatgtgtcattaattcatttgggggcattactnttatcaggtaaaatttggattttttttcccctcaggtcataggggaaatcagctcccccnggggnatttctaaggggcccccgtttttaggnccaatatttttccagggaatcctggccncggggccggatt

SEQ ID NO: 2904 - DNA, 263 bp, Homo sapiens; identical to SEQ ID NO: 223
  misc_feature (1)..(263): n=a,t,g or c

SEQ ID NO: 2905 - DNA, 439 bp, Homo sapiens
  misc_feature (1)..(439): n=a,t,g or c
ttttttttttttttttatagaagtactctgatttttattgttatacaacatatatatataattgtttccccaaaatatgcacaattacatgtgtcaattttaaaaaatgaatgaagactataatgtaaaacctatagctgtaaaattcctagcacaatacagaagggtgaagcttcatgacaactggtcgtggcaataatttgggggacgtaacatcaacggatgagacaacaaaagcaagggaatacacatggtactgaatcagtgtatgaaaaatatcccaaacagacaaagcagaacatggaatagatatatngcacattgtagtattagtcacaaacatgttaccttggaagcaaatgtacccttaaggattgagttagattcagcaaacagggcacgtacaatcactggggatagcattcagccttaaaaataa

SEQ ID NO: 2906 - DNA, 350 bp, Homo sapiens
gctttttaaaggtgctttattaacttcactataatgagcatctttccatgcaataggtaaaattcttctgctaacaaaaatcttacagactggttcaaaaacacaatattcaattagaagctggtaataggagacccacgtaaacaagtgacaggtaaaggtttacaacaagggcacatcatgaacatgtaaattcgaaagcaggggtctgtttccgtaataactttagggaaaccatcaggattcagggcataaggcaaaactcatcatgatggtcatggtgaggggggtcagtgctgactgcccgcagactatgactcaactgcttttccctcagcttttccatcagc

SEQ ID NO: 2907 - DNA, 411 bp, Homo sapiens
ttgttgtgtgtgtgtgttttttctttttaagtacaaaaaaatcaaagcatacagggctctggcaactgtcaccaagaagcagagcctggggctgcctcctacacccattctcccacctgtccctgcccagctgcctttagggtaaaggagaccccttcttagagcagctcagactgtgctctgcagagcgccaggcattctgggggtgtctagcagtggaggacagtgcccccgccctgactccatccacgggaaggtacccgctatctatttcaaacactgcttccctgaaagacatcacttggaaaaagggagccttggttaaaggagaacatgaaaagccactaattaacaaataaaggaggcacccaagctacaggactggattcctggatggaaagagggaagccg

SEQ ID NO: 2908 - DNA, 446 bp, Homo sapiens; identical to SEQ ID NO: 1800

SEQ ID NO: 2909 - DNA, 322 bp, Homo sapiens
  misc_feature (1)..(322): n=a,t,g or c
ttatacttaataattttattacatgtacacacaaaatcatagcaaaatatgatatattttataggatttttttgtcttttcatgatgccatcgaatatttgcaaatgcctaaatggaaccctttcttcattctccacacaagtccaaaaacacaaacacacacgcacacacatacacctatacacatgcatccttttaaccaaaggtaatactcactggtgttaaaactaacagctctactggacaatggcttcatggacattttagaggcagtcttaagtctgctgtgggcacaggcatgtcggatatgatttccctgcag

SEQ ID NO: 2910 - DNA, 285 bp, Homo sapiens
  misc_feature (1)..(285): n=a,t,g or c
aaagttctgattggctactgtaaaggcaatcttagaagatgcatgtaaatataatataaatcaactttcttatcaattagacattttccccactcacatctcttagtttttagggtattcagtcccagcaaccaaaaaaaaaaatgtaaatcatattttgtttctggctaatgttcaatcagttttncttttataagagcttttgatgtactgtttctacggttctttaggcacttacacataaaaacattcagagggttttccccttaacacacaacttttaat

SEQ ID NO: 2911 - DNA, 324 bp, Homo sapiens
aagaaataagaaaatttattagatggattatcaagcagtaaacaacatttttgggagggaaataagaaaaacaagtgtgacctcatactgggttctggttagaacacagccactagaacaaactccagtctttttcagtctgttgctgtacttcagatttaaaatctgggaatgagcatgcagcaatgctccaccagatgaggaagaaaagctgttaaaaggaactcaggatgttgttaggaagggggagtggatgccaggccttcaccagactatccagaagccattccatggggtatttggtctgcatactgtgagacactg

SEQ ID NO: 2912 - DNA, 320 bp, Homo sapiens
tttacctttctgaagaaaaaactttttatgacttcaatgacatgttatttttaagcagcagcggaagtcttaaacacctttacatgcttcgaaatactgttgatgatctgattttcaatactgtattgggtgccattaaagagaccattgttctttgaatcagtctctgtgttgctgtgggaaacacggtaaggcagaagcactagaatcatggaggcaaattactgaaacactgtgatactgaaatactgctggattctggaataatcttctgacatgtggaattagacatctgaagtgtcgctccaatcagtcacagt

SEQ ID NO: 2913 - DNA, 443 bp, Homo sapiens
ttttttaacctgcattatcgtttattgtgatcctaattcggtccacagtaacaattgaaactgcctcgactaaattttaagtttctggggcagcaccacctgaaggcagtgactgcctttttaaaagacagggttctgacattcagagatttctgtttctctatccatcatttttgggcatcttgaatcacctgatttagagtcagtgacatcctgactggattggttctgctctcgctgggcgggtgagacccccagacccacgtccacagtgcacctgatgttctcccagcggtcgtcacttccccaaggaggccaggtaggcataccagaacagagctgccaggttggcgaagagcacccggaacttcagagggacgtagttggatgttgatgaactgtagtggcgtccacacccgccagttcatcctcagcgccggcca

SEQ ID NO: 2914 - DNA, 228 bp, Homo sapiens
ttgctccttcaggacatttattcagttactgtatactgaagccacagagaatctcaaatttgacctcgctttctcctttgatccaccaacacagattctaagtccaatcaagagctgcttttgataggaaaaagagttaattggagtgctatttctgccttttataaatcctcccatagggggttcagggtaacacagttcccagacttttggggtgtgctcctaaac

SEQ ID NO: 2915 - DNA, 465 bp, Homo sapiens
  misc_feature (1)..(465): n=a,t,g or c
ggaccggggcacgctttaatcgggagggctggagcagagggcggccccnganggngtngtgtcagtgtgggcggcttgnggggccgagtccgctggtgggctgnacccaaggggagcagccagtagggaagttgggcgagttccagaatcagggggcgtggctgtgtggctgtggcctccgtggggtgggcggggcttacatgccgggcaccaccccattggtctccatgttggtgaaggttaccccgcaagttctgctcctcctcgaaagccttgaacagtgagttgaagttgccggctccaaaaccctnggtggttgttggcgctggatgacttccaggaagagcgtgggccggtcctgcaccggtttgggtgaagatctgcaggaggtagcctttctcgtcgtagtccaccaggattttcagctcctccaagggcatcaatgttctccttcaacttgatctt

SEQ ID NO: 2916 - DNA, 427 bp, Homo sapiens
gtttacatcatattttattttattacagtcaataaatatacttttatatatgaaatcattatagaatacatattttaaggcactaagtctcaaaagtgaaggcacctgttatactttgctctctaatttgacacattaaaacatgagaggtaaatctgccaatttattttgagtttgcaagcttacaatttaatagaataaatcaggtagcttcagaaatcaactaagaaaattaacaggctagagtctgaactaataatcttgacatggtttgattatcacttggtttattctgattactcatttaccttttcatttatgaatctaaactgacaattccacctttagaggtataatagagctattaaccgatgagacacatctactcattctctggtaactctgggacatcgcatcttgctttaaa

SEQ ID NO: 2917 - DNA, 364 bp, Homo sapiens
  misc_feature (1)..(364): n=a,t,g or c
atacatgtttattncaaaaccacaagcacagtaaccataatgtcaacataaccgtatttcctaacggaacaggagatcgccatgcctaagtgcgtgcgtttnccaaagaaatggcggcttatttggaagctcacacgctgcaagtgatgacgagaagccctgttgtgaactaggagttctaaaccattaaacatttaattaccactttggcaaagcaatgcacattaccatttctacaattggaacagcacaggagattttaaaatgcatctttattttttagaatcttcagtatncacaatgtgtaaaatgangcagcattttaagtaaagctctatgccaaaaacagtttcttaaaaaagtc

SEQ ID NO: 2918 - DNA, 430 bp, Homo sapiens
  misc_feature (1)..(430): n=a,t,g or c
aatnagttctttgatgctgtctagagaggtcaagggctgcttcagacccagaactgcgtccgcaaacacagagtcaggtgacaacagacaaatatagctggaaatatcaggaattaaaattacatggaggagaaaggaaacaagggagatacaaaggctagtccttttcctgactcaaattgctgattgccatcaatatgccttgatgttagtcagttatccaaaagtctttgtttcacttgcacaactgatccctcccacaaggccctccaagaatggtttgttacaaggcctgccaacagcaatggcaaagaccaagggcctcctgaagctataatgtgtcctgtaaagaaatgatgccagattttctcttatccgaatccctgttctatatccaggaatccctcatgggtttttgtatctggtactg

SEQ ID NO: 2919 - DNA, 426 bp, Homo sapiens
aagagggtcaatgaattcgttgtttaaatgaattcaggtgggaaaccaggggcttagactagggctgtgacaatggggatagaaagaggagctgaacgggagagaggtttcggaggtagtgtcaatgggcaatggtggccacgtggctttgagttatggtctgacaagctctctgtacacctgccagggagggagggcagggtgctctccaagtcgcaccttattaaatcctcacaacacctcggcaaggatgcacctgctttcccagttacagatcaagaaaccgagactcaaagagagtaagcaacttgcccaaagtcataaagagtagagatgaagtttgaatccaggtctgtctgctttctttcatcttgatgtctctctgggaaggacttagctgcacaggaaagcctggatggatttgga

SEQ ID NO: 2920 - DNA, 413 bp, Homo sapiens
tatttattctattattattattttgttattgttattactcaaatgactaaaacaaactttaaaaattagtttttactaatacctttcattaaagacacatgatggcccagatatctacaggtatccaggggaaattaatctggaattaaattaaatctgctgtggtttatacacagggtggataaaagcttctgatcttaaaacaggaataagaccatttgttcatgggataggttaaaaatagatacttaatgtatacatattcaattcaaataaagaggatgtcacataaaaattatgggaggccattgttttggactgagtacttggactaggctcaactggccagaccaaaccagaatggagtcactcattaatgtaattaatcaaactctaaaatgagccaatattcc

SEQ ID NO: 2921 - DNA, 438 bp, Homo sapiens
ttagtgtcaatctttatcaatttatttcatacaaaacagtagcaatgtagaatgtggggttatcttctgctgccacacacgcgaaactgtgaacattccaagccagtgtacagtttaaaagggaggctaaacaatagcattaaccatgctactgaacacaggaactttttatttaaaaagattaaaaattagatagcaacgtcttcttaatattgctctcatcattgaagacttaaaagtgactttataggtttaaaaaaaaggaggaaagaggaaaaaccgagaggctgctacaacactgccatatagtcaaaccatcatacttccatatttgcatacttgatagcagcagtatttttactgaaccgtgagcagctacctatagaaacacaaagcgaaattctatggcagttattgaccaagggcccaaaggagaac

SEQ ID NO: 2922 - DNA, 403 bp, Homo sapiens; identical to SEQ ID NO: 1819

SEQ ID NO: 2923 - DNA, 323 bp, Homo sapiens; identical to SEQ ID NO: 1820
  misc_feature (1)..(323): n=a,t,g or c

SEQ ID NO: 2924 - DNA, 627 bp, Homo sapiens
  misc_feature (1)..(627): n=a,t,g or c
ttattgaaaaagtacaaatagaaatgtttcagaatgtcttaagttttatctacctagcaaataccaatttataattatgtaacagtgcagatctagaatgtgtacaggtactttgggagtaaccagaagagcatttcttgtcttcaaagagattaagcatgacaaatttgaatactgacttagataataggttttaattatatctaaaagtctatgttgatattgatcctctggcagttcctctactagactccagccaggggtcagaactgctgtctcactcttaatacattaccctatccattcatctggcaaattactttccaatagtttggcatgtgtatttatgacaaaggttgattacaaattctacactgagggagggttactaaaaccagacnggaaaaccaacctggaattaaatcatttaattcngaatagaaattacggattttaaatnccggtaggattataactttcattttggaattgggtacatatacttggcagactggctcttangctatgggaagctgcttgggaaataagccggatcttccagttactccngttttaatggccnccgtacnaaatttccttgggggggaaaaagntctaaaaagactg

SEQ ID NO: 2925 - DNA, 593 bp, Homo sapiens
  misc_feature (1)..(593): n=a,t,g or c
ttctcaatgcacataaagttttattagaacatatccatgatcatttgttcacgtacagtattgtctatagctgctcttacaataccacagcagaggtgactaactacaacagacactgtgaacaccacgtaaggctgtctagcccttaccaaaaaagtttgccaatccctcaatagttcatcctttccccccatgatctgcagtactgtctctgttgtaaattagagtttcatttatttgtgggtctgttttggaaatttggctcaatccattggccaatttaactatctctacaccaaaaatacactatcttgatcacaataataatttataataagccttaataataacacaagtctccctgcctgatgttccttctttgttaatgaaatagctaaccctgcctctttacttttccaaatacatttcagaatctggcttccaattccaggaaagaccttgttgggatttggtttggaatcacattgaatccataggtgagttttgaaagaaactgacatacttatgccattgaggctccatccattaatgatatatcncctccattatgaggtctcttnaagtcctcaata

SEQ ID NO: 2926 - DNA, 409 bp, Homo sapiens
  misc_feature (1)..(409): n=a,t,g or c
tccaagccgcctggtcctgggtgctttgtcttggcagccatagcagatgaatgcactggcgtttggtgaaaaactggcaggctttgagggagtgagtcaagtgcatgggaagggaaggccctctgcatangntccagggtggtggcctgagnaagcgtgtgcccaccacacagcaccgtgagagaagccggccagctggagcagtgcacggcacgtgagtgangtgggagatgaggtcagagagatggggggcaccttggctttgaccctgagtgagaagggctcaccggaagagttgcaagcagatggggggatggacttctggcctttatgttctttaganggtccctccggagcctgtgntttacctcattaaaggggcccaagggtaaaaagttnaaaaggccna

SEQ ID NO: 2927 - DNA, 587 bp, Homo sapiens
  misc_feature (1)..(587): n=a,t,g or c
catttagtcaaatatttatttgaactcatacaaagtttagtgacataatttaaaaggtgaagaactaaaacgcattccaaatattgaccaaaatactgtaggaagtagcttgggaaacttttcatcaaaatcgttaggcacattgccatatcattctccataaaatcatatccctcctcaaaaccacaccctccaggtgttgaatttatgggctaatttgttctgtgaggtgccaaaaatgaagataaagtaagaaatacagccaactagaaggaagagatataaatgtacaaacaggccatttctgctagagtctcaggcattcaggaggttcacaatcatcatacaaatatataaaattttagtgagctattgaatccatcttctgcctctttatttcttcacatcaatccttttttcttcctactactggtcagctttggggacatattttaggttcacttttaatattctggatttccgatagattgactgcaggnccgggaggttcctcgctccnggaattggcttcttctcctcatccgaggtgggaggacaccctcctccacttcgggggacattctttt

SEQ ID NO: 2928 - DNA, 448 bp, Homo sapiens
  misc_feature (1)..(448): n=a,t,g or c
aatggatagccagttttaatgaacagaggatactgattggtataaaaaggtgtgtttgtcactgaggtgtcctcattttctagatgaggagttgtcttctccatggtcttgaacgcctgcttcgccatggcaccagcgtctgggtgcacgctggctgtcgccacagggcaggagctgctcatggaaaggtgtgtgcccctagtgtgcagcactggtcagcttttccacatagtaacaacagccttgttctgggcctgagaaggcctcaaaggtagacgaaaaggaaccatggccaaatgcctatcaatcagcccggtacctaatgtaacccatgacccanntgtgagggaggctgtagctttcaccctttcagccctttccctcaagcaatgtggttctcagttttagggcagagcttcttaagattcactttctgggcgtttagggg

SEQ ID NO: 2929 - DNA, 305 bp, Homo sapiens
ttttttttttgagttttcatattttttatttaagaaaatacttgaattgccttagacaatattaaatatttaaacaacatgagaaagagtgccagaggtcagaacatagtatttagttcactgagttgccctgacagataatgaatggggattgatttaatagtgaccaaatacactggccatatttactaaagtgctgtaaaatggccaagtgaggacaactgcatctaaaatgagatcaaatcctcgagtccattccttttagcagaaatgattaaaaccatcttggcaggaccaagtctttg

SEQ ID NO: 2930 - DNA, 305 bp, Homo sapiens
tagttagaaattacaagtttatttttatattttgaaaaaggcataatagaaaacaaaaataaacaaccaggcatatcaatatttgtgacatacacatacacacaaaaatgaatataggaaataacacgaagaaaaagcatagtatgttttgaaaccaacgtggggtatgaacagatttttgatgaaatacaactaaaggttttaagtgtctatgtaatgttcgagatattacgatcactcttatcctactagcaaaaattagcaaactaggctttaaaacatgattcctgttgttttagcaggat

SEQ ID NO: 2931 - DNA, 506 bp, Homo sapiens
  misc_feature (1)..(506): n=a,t,g or c
gcggccgcgtgtgctgctcggtgcccagcgaggtgcggcgcatgaactggcggtgcatgcggacagcgcgcccgacacaagcacgttgcagaggacggtggcgagaatgaggaaggagctgaagcccgcgtacatgtaggagtaggcggcgtgcgcgatcacgttggtggtccagtcgatgaagcaccaggtgtctgggtactgcagccgcgagctaccgagacccatgttgggcagcgcgcaaaagagcacgttggacgcatagactgcaaagagcgtgaggcccgccaatcgcttgtccacgtagtgctngtagaaataggcatggttgatggccaggtagcgctcgacactcatggcgcagatgatgctgaggccggacagcgtgaagaagagcagaatgaaggtgctgtactcgcacacggctggcccccgggcattggcgtatcatgtacgtggcgatggtcacgggctcaccacaagtgcccacaggtcggtgcagcagc

SEQ ID NO: 2932 - DNA, 380 bp, Homo sapiens
tttttttttttttttttttttttttttttttttaacttcctgaaaactctttataataatgcaggacaactgtatatagcaaacgccttcaaaatttaaactctttaaacatttaattcttcagcattaatacacacaaatgcggtaacaggggtcaggggggtggtgcgggggcaggtgggttacagcctccactgggatcagggtttcaacagtgttacttataaattatattacatcaattttatttactgatctaggcagccagagggtggaaggatatacaatgtggaggaaacacattcataccggggtgaggagtgctggcgggagacacggctctttaacatgaaaaatgtataaagtatttagcaaaagtt

SEQ ID NO: 2933 - DNA, 288 bp, Homo sapiens; identical to SEQ ID NO: 56

SEQ ID NO: 2934 - DNA, 566 bp, Homo sapiens
ttttgaagcctcagtcataaatttaatcaattctaggttgaatgctaagaaaagttttaaatgtggaaatgtggtacataacatttcaaatataagtggaaggatcatcagtagtgttatcaaaatgcataatacagaaactttttaagaaaggataaaaaattacactcaggacccataactcttcctcattataagcatatgtagtgattcattcatgcaggtttttatatgtagataggatttttttttccttttcaagaattccattgtagccatgagatgaaaaatgtattatggtaatggtatagctttcttctattttgcttttagtgttaggtttgctaaaagcttatttaaaattcccaactgacataatgtgttttcaataagggggacgctgccgtgtccaatacccttcccctgtcattgttcggtaccatatctcctggcttccttctacatgggtcacttagttaagagggaggccaagggagttccgatttcaggcagtgtgtggcagggttactgtcctagcaacctggctactcctcactgtgaacgtt

SEQ ID NO: 2935 - DNA, 202 bp, Homo sapiens
tttttttttttcatatagtctagtctttattgaaagacttacttcaactgttgtttacagctttggcttaagttggccattttagcctctcactgccagcagacataaaaatcaagtgggaatggcacgggggttgggagtgaaaatactagtagagaaattatgagaacaaagaatatggcagtcagtcagaaacacatca

SEQ ID NO: 2936 - DNA, 423 bp, Homo sapiens
aggattccatatttcatttccattttattacatgttcacattatttcctgaaatcatcttagaaccttttgtttttscaaaattttagaggtccaggccctgtgatagctatgtgatgtttttyccagcacataaagcaaattcatgatgtgaaagaggcaaatsacaatagttaaagtatgtcttattttgtaataggattyycytaataaaamattattgtggaacaaggtacattaaatttsgcttgcaattaggaaatatgggagcsggacttgaagagcgtgtgattgagtccccacatctaactgatgaggaaacaggctcagatgggtctattgatgggtcacttgctagamgcaaaactggamctwgraaccacgscctggcttctaggcagcaagcaatagttttctcgtgccb

SEQ ID NO: 2937 - DNA, 315 bp, Homo sapiens
ggagacagggtctcgctctgttgcccaggctggagtgcagtggtgcaatctgagctgactgcagcctcaacctcctggactcaagcaatcctcccaccacagcctcccgagtagctgggaccacaggtgcgcaccaccacacctagctaatttgtaaaaaatttgtagtgatggggtcttgctatatagcccaggctggtcccaaactcctgcctcagccattttttgtttttaatataagcaaattatctcctccatccctccctggggcaggagacagctaaggtggggaaggctccccagagggttgcagag

SEQ ID NO: 2938 - DNA, 346 bp, Homo sapiens; identical to SEQ ID NO: 123

SEQ ID NO: 2939 - DNA, 354 bp, Homo sapiens
  misc_feature (1)..(354): n=a,t,g or c
taaaagtaaactgtttattaaaagatacagcaaaggtacagatacagagatacatacaaagatacagatatatatatatatnnncatatatatacagtcttgctgttttcatgtgcactatatttagcagcacattatttaatcaggcggcattttaatggggttgttttgacacttgggcattattaagatacaactatagccccgtgggaaatttcaacgtttgaattccacttctccgacttttaatagtaggcaaagaggggaaggagaagggaatgggagtaccaagggctgagcattagggttaaacacaaggantttaaaaggggccaaggntaggcaaaggggaag

SEQ ID NO: 2940 - DNA, 387 bp, Homo sapiens; identical to SEQ ID NO: 126
  misc_feature (1)..(387): n=a,t,g or c

SEQ ID NO: 2941 - DNA, 428 bp, Homo sapiens
  misc_feature (1)..(428): n=a,t,g or c
aanttacnttttagccaacttttatttttatgcctagaaaaatacatgggacgtttaggactaatgtgctgggcaatttgctacttagtgatagtaacacaatcctgaaaaggcaagcacaattattctgtactttttaaaagttttattcagcaataagaccataatttttcatatttaaggagtatgaaaaatttgtggagttttaaaagctgaatacatgtagcgttggatcaaggcacatacaagactggccaaagggcggtacaatgcactttggttttttgttgaaaaaaaaaaatcatgggcaacagaaaagtgatatggtttttcaacaagtaacagctcacaattcagtaggaagctagaaggaaatgttacattacgagttcnttatataatatccgggaaatttgtgacagtaatgt

SEQ ID NO: 2942 - DNA, 390 bp, Homo sapiens
  misc_feature (1)..(390): n=a,t,g or c
actggcttttggttaattgacctagagcccagttctgcttaagcctgacttttctaaagggataattagccaaaatttcatctggagctggctagagcccagccatgctaagcttacaaagaaaatggttctctcatctggcccccattacactgtctcaaataaaatcctcattggtaccacaaatcaaaaacaaaaccccaaaattaaaaagaaatcccactttcctagactaccaccagagacaattcaaaccaactcatcacttaataagcaggattatccntagtgatctctatgagcattggattgggaagacagaaatcagtgcgacagggcaagagnccacatntggggaacggcaagcagtaagggcttgaaaacacagcc

SEQ ID NO: 2943 - DNA, 451 bp, Homo sapiens
  misc_feature (1)..(451): n=a,t,g or c
gtgtctcaaatagctttattgttcctttgtggatctgtcggcatctgtatggctaccttcagggtgcagaggttttaagctgactctgaaatggaggacattcagttactattgcaagaagttcaagaaaaatttaaaaagctccaacttctgtcccccagggtcggtaaggtttattgtttgttccactgctggtctgctgaggactggacgtggctgatactgacaagggcgggctgatggctgtggcgcggcactgctgctgctgcgtttgggggaagcatggggaatgcccccgcgaaggacagagggaagctgtgtgcagccgcggtggctgttgcggctgcggcgttggacggtggcagagagggacaagagagaggtggagagaagtggcacgcagggggcgacgctgcccgtggaatggcnattcggagggctgaatccgcat

SEQ ID NO: 2944 - DNA, 446 bp, Homo sapiens
gatatgacaatcctttattcactcggcacatttggtttctttgcattttcttccattttacattgcaggtgtggctaccaagagctggataacgagtccctcaaacaaagtttggaattgcgagatatattggggtaccttgattcttgagacagttgaattcttctagttgatcttgttgtattaaaaagtcactctcaactgaagtgaccactgcatttcttttgtaaaaaggtcatttgactggcttttcctcacaactgccacccatgcagtacaaaagcaggaaatcccttttcatgaaaggtgtaagtacaagatgacatttcacatttttttaaaaaaagaatccttcatgggaatatatcctaataatcaattatatggagacagttttatgtacaccaaatttctgcaactttataataatggaaaattagaaacac

SEQ ID NO: 2945 - DNA, 501 bp, Homo sapiens
  misc_feature (1)..(501): n=a,t,g or c
tttttttttttatcaaatctttattctaatgaaatttaaaggancctctggtacgggntcccttgnccgggtatcgcggctccagggagtaggtatgggaaggagaggcccagagcctctctgcattctccacactgatccaacacgtcatcataaggaaaagcactccagcaggagaggtgtgcatgggaagaactgggttggccctgacacaagcgtgacccccatggcatcacagttgcctcagccaagagacaagagacaatgacacccagctggacaggccaccagatgtgatgacacagccgaagcgctggtcccacgccagccagaaaccaccagctgctcgtcccatgtgaaaaggcagcntgtcccaagccctcattaagaaaggagattaaggnagcaattcccgtgattccacgacacacgtgacattctcggagagagacacaggcttactgtgaaagttcagagnacggtgcggtccctaagntgggt

SEQ ID NO: 2946 - DNA, 401 bp, Homo sapiens
  misc_feature (1)..(401): n=a,t,g or c
agtacagacttacttttttattttaaaatttttgctataacatttctggagccaaagnagaagggtatccattaacttcattgttgccttaattnangggtgggtggcaatgcaagggtgggaacacaaggaagaaagaaatattaatgtcagctaagaaatcatgttatcaggctatactgtagttggttgcttctgtgttactggacatgacaaatgatctggtaaatgatgttaaattggcttgaaacaagagagtctcccaattcttagccacggtttcagtcagccctggatgaaagatggaaaaatttgacatatatctcataaagggaatttgttgcttccatggagattataagatggaggttactgaggaattaggtagctgggtggcttac

SEQ ID NO: 2947 - DNA, 511 bp, Homo sapiens
  misc_feature (1)..(511): n=a,t,g or c
tacacacactgtttgaaggtactttattaagatcaaagatttttcattacatttatttataaatccttcctagtcaaaataaaataataaaaatctgtatctttagaaagaacatagttttgtaagtctgagaaggttatgtttgtcagtttcaaattattacagtttagatacattcaatcattacacaataccaggaaggtcagccttaaagataccaagaacttccatattggtcagtaaaataagggtaaaaaattaaattttactttcacctttttatgtttgattgactacagtcaataatagggagtaccagaatttacctttttgggtcttgattttttaaatatatggaatttttaaaaagtgaacggtncctccttcctccttaccataagtgggctccaaccttangggaagctgggcttcctggaagggaaggaagtgcnaattccnccctggcngggagaaaggaggccggggggaagaaaggtnccgaattccgggg

SEQ ID NO: 2948 - DNA, 452 bp, Homo sapiens
gatcattccatcatgtattgatgcatacaaatatcacattgtaccatataaattatacaattattgtacaaatatatacatcaatatacaattgtacatacaatacatacaattgttgtacaaatatatacaattattacttgtcaattaaaaattttaaaaaagaaatctgaaataacagttgccccctatgagcatctcacgataaatccctttaatctcctctacatatactgagtattaaaaaacagaatcgtctagaacattgttgctgttctgagacctgtctttctcatttaacacaagtgaacatttttctttgtcagcaagtagcggtaaacatcatccattctaatggctgtattttttaataggtggagttgtatcttcagggcagattcctaacagtggaatggctgggtcacaagggaaatgtgtaggtagtttttgga

SEQ ID NO: 2949 - DNA, 364 bp, Homo sapiens; identical to SEQ ID NO: 3
  misc_feature (1)..(364): n=a,t,g or c

SEQ ID NO: 2950 - DNA, 351 bp, Homo sapiens
aagttctcttaagtcaagtaaaacagaaatggcactttctttttagggttctcccacacagctgcactgtcttccttagccagcagaggacacccttcagcttacaaagactcaccgctttcttctggatgaaaatttgtgcatccttcaggtggccggcaatgttctcacacagacgtttcctctgttcctcattcagcacgttcacatagaatgcccgcacctgagtaacgttatcatcattggcaagtgttgaatctccgcacttctccaagaatattggatgctgtgctccaaggcagaaggctgtttgttccggagcaccaaagctgttggggtagtaatttggag

SEQ ID NO: 2951 - DNA, 373 bp, Homo sapiens
  misc_feature (1)..(373): n=a,t,g or c
tttttttttttttttttagatctctctatttatatatatatatatatataaaaggttctttagcagttaaatagattccaatatgaacgtctcccaggacaaagctgcgtctcgcctctgggtcacacgcatctgtgcggctggggtgtatgtgccgcgtcacagcagctctntnnaaatacgntgattngaacgcagttccctgtggtggtaaaaacacattcctgacaagtgacaagcatgaanagtccggcagctgcagcgcctcactcggctgggacctcgtacttgaagatgacgctgaagagccggccgcccagccgctcggcagccacgcgngtcttgattactggccagctttgaggtntcgcag

SEQ ID NO: 2952 - DNA, 650 bp, Homo sapiens; identical to SEQ ID NO: 12
  misc_feature (1)..(650): n=a,t,g or c

SEQ ID NO: 2953 - DNA, 588 bp, Homo sapiens
  misc_feature (1)..(588): n=a,t,g or c
tttttttttttttttttttttttttcttagagcaaacaaaaaattttattagattatatacctgagcaatagaaaacttcgagataacattttaaaaatattgacacgttaaggagtattttactttcaaaataccataaaattgattttaaattccctttggaagaaaacatcccctagtctccttcactaaattacaaataattacccaaatataaaaaggacttgcaatgtttgttaaatatggacggcatgaagacaattaagaaactataggacttatttccaacaagaatacaatatgcatgaagttttgaaaatgtgactttttaccacagtttctgagagtgtaatagtactaaatgttctaaatgtaatctttcagatccacgagcggtgaaagtaatgctggtttggaaaatgaggttgatactccccgttaagcttctcagtgaatgggctgcttctgtttctaagctgcaggaacaaagcacctctatctataagcncataaacacacaactcaactatccagatactccggggccacaatctcaatctagggccgtaaaaattcaccaattgatg

SEQ ID NO: 2954 - DNA, 378 bp, Homo sapiens
aaattaaattattgaagcagatcagttttcgaaatattttagtggaaccatttctaggacaatgggcataaagctatggttagatccacaaatttcagagcattggccatagaataaccctggtcggtttgatgttactgttgcttgatttagtcggcctgggatggcatcagttttaagtcctagggaggggactgctcatgagtggaggacgtcttcagatgaaattaatatacggattggaagttctattggcagaacgactcggttatcaacttctagcagtcgtagttcaccaggttttaggtcgtttgttgggattatatatgaatcaaagcataggtcttcatagtcagtatattcgtagctcagtatcat

SEQ ID NO: 2955 - DNA, 437 bp, Homo sapiens
  misc_feature (1)..(437): n=a,t,g or c
gaggacagacgtgaaaactgtttattcatacagaggaggttccaagccacgagggcnccgtcgaaaagcacatcacctctgtaacaacacacgagacacggccatggcttcacagctgcagcaaatcccaattcgccccacgacacattcgtctgccctctgaccatcattcaatgtccctccaacttcattcaagtcttctccttaaaactgtttcctaatcttcatgctatgaatggtattttcttaacacataattttgtagataaagaaaaacaattaaagtgtcattagttggtgcttttttatatgagtgaaagacctgacattattttcccctcaagccagaaaaataatagggaggagaaagcatgaagacgtctcatccttaaccccaaaccattcacaccccaggtcacacaggccggctgggtcct

SEQ ID NO: 2956 - DNA, 378 bp, Homo sapiens
  misc_feature (1)..(378): n=a,t,g or c
ttttttttttatgcttgaactaatttattgatgagattctcatttctgtagtataaaaggaaaatattttgcagttatctcgtatttgaaagactttgccatagagaactttatcagaaatggatgaacttttcattatttcttataagcatattggttttggcctgcttgagtttaaaactttttttggtagacntagaatgttaatatttagataaagaaaatattttacngaagacattaccagaaagtaaaataacttgaacatttcngtattagcncnttatcagagaataacatttattttatttggaaagttttccnaaatatgagacnatcngcnatttctcagacnaagtgaaaaatttaataaaatag

SEQ ID NO: 2957 - DNA, 462 bp, Homo sapiens
atttttctactttcttttaatatcattttttaaagttggtaagcagctagacatcatttagaagcagacgggttaaaatagacaagaaatagcaaagacacatccttcacatcgtacagaactgtattagtatccaccaccaccatcacaggggagggctagctgtcactggggtcaggagtactctccattattgtgcaggggaccagacagcatttaggtgtgacgatgtcaaactgagtggacatagagagtgccgggatcaaggtctacagttttggctctagacttgcgtgagggttggttactcttaatctcttccaggctgtgctggatcccatagccgaagtagatagcaaagccaatcagcatccagaccccaaatcgggcccaggtaccagctgtcatctgcatcataaggtaaatattcacagagatgctcattagtgggaggagaggcaa

SEQ ID NO: 2958 - DNA, 379 bp, Homo sapiens
attgcattaaaaaactttatttcttttaaaaggtccaatataagccaaattaaccccaaaatttacagctacacttagagatctcctgaactaaatggcattgtttgagatgagtgtcttgttaaaggaggtcatttgctattaccaccatttcacccaaagtagttctagagcagaagctggtattataatacacatcagatatttcagatgtcatcttttatgtataagttaaataaagcaaacaggcttttctactctgtgtgaggataagaaacactacagaacagggcctgaatgctttagacatacaaggtgtaaccataaaggaaatttctacggtgctgtgttcattcattcaagtaattaatgtacttat

SEQ ID NO: 2959 - DNA, 65 bp, Homo sapiens
gttagtgagatagtttatttagggacaaaatacattaagatgttttactccactagagcaatctt

SEQ ID NO: 2960 - DNA, 314 bp, Homo sapiens
tgtaatcatcattcacgctgttgatgatggcttcccaccgcagactgctacagggaccctaatgctcttcctgtctgacatcaatgacaacgtcccgactctccggccacgttcccgctacatggaggtctgtgagtctgctgtgcatgagcccctccacatcgaggcagaggatccggacctggagccgttctctgacccatttacatttgaattggacaatacctggggaaatgcggaggacacatggaagttggggagaaattggggtcaatcagttgaacttttaaccttgagaagcctgccacgtggta

SEQ ID NO: 2961 - DNA, 335 bp, Homo sapiens
acaagcagagtctcactttgttacccaggctggattgcaatgactcaatcatagctcactgtaaccttgaactcctggcctcaagtgatccacccacctggcctcctcaagggttggaattacaggcatgagccactgcactcagctcatcatcacttttttagagaagtagcataatatggtaaaagaacttgagctttgtaattggacagagcctggttcaaattttacctctgctatttatcagttgtacaaccatcaccttctaagcccctgttacttaatctgtaagatggaaaagtcatcttcctcctaaggatgttctgagaattaaa

SEQ ID NO: 2962 - DNA, 233 bp, Homo sapiens
  misc_feature (1)..(233): n=a,t,g or c
ccacttactaaagtttattaagtacaaagaaatgaatctncggaaggagacatcaataaatataaaatacacgtgaaacattggaggngtcacagactgcagtgtcagtgagaatatgtgacaatggcggggactgtgtgactcagatgtctctaagtctgagtttacagtcaaggggttaaacctttacagcgcccaagggactcagtgcaccagcatgagctcgaagggtt

SEQ ID NO: 2963 - DNA, 371 bp, Homo sapiens
  misc_feature (1)..(371): n=a,t,g or c
aagtaaaatttaataccnactcaaaatttncaatgaaaattttaagtattgagaagaaaataaaaataactttgaatcccaaatttaccttttgatattttttctatgcatatagacaatgttgagtctcagtgagaaagagctgtatgtaaaaccttcaaagaatgttttactacgnaacacgncaagacataaacagcactgtcaatcatgaaacaaantcagggngaaaaatctttccttctctcctccctgtctccctcccttccttctttctctttccagattttgcatctcaaggattctaaangnaccctgggtcaatatccagttaaaaatcagcagtgtcaggcacagtagcctaattatac

SEQ ID NO: 2964 - DNA, 284 bp, Homo sapiens
gtagagatggggttttgccatgttgcccaggctggtctcaaactcctgggctcaagcgatccatcagctttggcttcccaaagtgctaggattacaggcatgagccaccacacctagcttgtttattcttttaaaactgcctattttgccatgaaataggtacccttgctgtgaaagcctgtgaacacccctggatgtgtgtaccttcatttaaaaactgccttagagggcatgaaatgtcatcagggaagatctattccgagctgggtgtgagctctagccct

SEQ ID NO: 2965 - DNA, 254 bp, Homo sapiens
ttttttgttgttgcagttgaaagataagccatttattgaccatccacttttcaaataaaacacaaatgtgagcataacataaacacacccaagactcactagcccctgcaagacaggaagcattcttggacagagagtctgcaaatgagtttccttatacctaatgtctgaacttctcactcattctagggtttcatgctttgttatctcttacaaaggaaaggaaactggctagaagattcatgtacaagaag

SEQ ID NO: 2966 - DNA, 356 bp, Homo sapiens
ttttccaattacaaatttattaacccctaaaataatgttatagattcagagaaaattagaagcatagaaaaaaaaaagcaagattgtggtgacatatatgtaattaactgaacaagcaggaagaattcaaaagcatttgaattgagatcctagaattcatagctggtctccctgcccaccaagaaggcatgttaatctggattctttagagataatagaaatgtcttaaattcctttgggtgcagtaaaatggccctagcttgcactagccccattgaaaggtagagattaaattgaagataaccaagcacctgtcattcttcccactgccttctggatcactacaaagaaataag

SEQ ID NO: 2967 - DNA, 523 bp, Homo sapiens
tttctatatgctaatcttctctatatcattttaattttagtatatgtgctgctgaagtgagcacattttacggagttttaagctaaagtttcttttctcacacattgtcatataaaaggggtatttctgctttgtcccctccctgccatcataccaaaaaataaataagtacataaatacaaattagaaaagcttaaataagaccggtttttaaaacccaataaagcaagatgagacagaactaggcccgaagactgtggagaagattctaaaatggagagggggaaaaaaaaaccagaaaaaaacgggtttccaaaaacactgaaacccatggtatgtgataactttctaaccatctggactttggtaggagtgtcacgttttccaaagctgacttctggaaatcttaacctggattcagaaaaattccagcaaagtgagccaacagccaggaagcggttattttgcaagagatagggggtaattccatttacaaacatatataaatagaaataaaggccac

SEQ ID NO: 2968 - DNA, 374 bp, Homo sapiens
tttttttttttttttttaatatctcaaaaaggaagccacttgcttgatatcaaaagtgctgtggaaagaaaggaggggaaaaaaacccacaaataaatgtagaatctagtttattttaccaaactgtatatttttccacttaacatttctacattagcaatgatgtaactctccaacatttccttataaaaaaggcaaacaagaagtgacaactcatgctccaaatattaaaaaatatatttaaacatatgatcaagaagatttgggccgtgagtggtagctcacatctgtaaccccaggattttgggaggctgaggtgagtggatcacgaggtcaggagatcgagaccatcctggctaacatggtgaaacccc

SEQ ID NO: 2969 - DNA, 549 bp, Homo sapiens
ttttttgagacagagtcttactctgttgcccaggctggagtgcagtggcgtaatcttggcccactgcaacgtctgccttccgggttcaagtgattctcctgcctcagcctcccgagtagctgggactacaggcacccgccaccacaccctgcttttttgtatttttagtagagacggggtctcaccatgttggccaggataatctccatctcttgacctcgtgatccacctcctcggcctcccaaagttctgggattacaggcgtgacgactgcacccagcccaccacattttctttatccagtctatcattgatgggcatttgggttgattccaggtctttgctattgtgaatagaaaagcacagatttattgaagacaattcagagtgggagcgggatcgagccagcagctcaagagcctccccaattaaggtttgtaataagctagaaggaacccggcaacacccctagacgcccttcagaggcttccaattggttagatgctatgaaggattggctcaggaccaatcagtggccgtagtggagac

SEQ ID NO: 2970 - DNA, 284 bp, Homo sapiens
ttttttttttttttttttttttttttttttaaaaactggctttaatggacattaacaaataatatacactgatttatcacctttaagcaacaaaaacatgacttgtaattattcaaataaggtaggatttttctcttaagtacacttcttaaaagtcattcacaagacaactgggcatccactaagaccaaggcactgtgagggaggcaaacagcacaacatcctcacctcaaggagctcagcctgggatgaagacagacacacacaactccagcatgaggcca

SEQ ID NO: 2971 - DNA, 419 bp, Homo sapiens
tgacatttaaaaatatttattgacttctgtttgctactttcctgattgcatttaaggttaaatgacactagctaggaagctacagtttcctggaatctttcaggtaattaagcctaagcctgggtaatgggagggcacaggctaagactgacgagagaagaagacactagagagagcaacaaacaaaatgatcttgaaaaacatgctttttgagagcactggaatgatttaggggtgggtacagtgggagagtgaggtgggagaagaagagtgtctggtaggtgtgctcactgtcttcttggctgagaatgtttaattggaatagtgggcgctcagagctcctacaaaggcagagcaaagcttcttagctgacattgtttgagaaattgctggcaggctctggaatgcttgtttggctt

SEQ ID NO: 2972 - DNA, 325 bp, Homo sapiens
ttttttttttatccctggctgtgtggaaacagcgttttattaaatgcttcacacagatttggtataataaagatgaatatattatatcctttgcctcccccagagtgaaacaataataagggaggaggaaaaaaaaactataaaatgaaacataaatacaacgtaatgggacttggggagagggacccgtggcctgtccgggccgccacaggcaccccaccgctggcactggggacggggtcaccgggagccggactccagtccctccttgcccagccagagggtcccaggccctggcttccactctgctgccctgtgatgctgg

SEQ ID NO: 2973 - DNA, 323 bp, Homo sapiens
ttattttttttttttttttttttgccatatttttaaaatactttattttttacataatactgtcattacaaaaaaatacaaaaaaactactataaaaacattcgggggttgtcaaagtgagaaaacctaaagaccccaccccaggatctggctgaagcagtcttcccccagcttcttcactatgacctttatacaactatgggggtggggtgggatcacacaggcataaaagggctggaaattccccacacagcctccaagggtaagaaatgagtagcttcacatatcacaaaagtgggatttggaagtttgggggtggctag

SEQ ID NO: 2974 - DNA, 294 bp, Homo sapiens
tttataaagatttaatttatttaaatcacataagattattcaaagccataggcatgattaagtctctatagaatcaagaagattttctgtgtggagaatatctcgtggagatttgaaatgtgtcgcctctcctgagcagccaggattaactctgcttaggacgtttcagataagggtcaggctggcgtccttctttctgcctccatgggttgccaccttttgctatgtcaggggggtcgcttgcttaagacgttgcaaggagcaccccaaatgccaggcttcccaccatagctg

SEQ ID NO: 2975 - DNA, 389 bp, Homo sapiens; identical to SEQ ID NO: 2370

SEQ ID NO: 2976 - DNA, 148 bp, Homo sapiens
tttttttaagggttcaaaggcattctattattatcattgacagtaataacactcaacactcagtaagcttgcactaactatgcaccaggtactgttttaagcccttcagaccacagcagctttgtgttgtattattttccccgctgct

SEQ ID NO: 2977 - DNA, 317 bp, Homo sapiens
cagtatatagaaaatttaatatgaaatcacttaaaatatttcaacattaagaagtcttaattcagtgccttggcatgagacatttaaaagcatgtttgggtctaatctcaaattagttcaggggaacagaaatagctgaaaatttatgtatatgtgtatgtatatatatatatacacacacatctgtatatacatacatgtatatattcaaattatatacatataaagatatttgtagattcaagatatatagggattatatatctatatatattatatgtgtgtctatttatacagatatatatatatatatattc

SEQ ID NO: 2978 - DNA, 348 bp, Homo sapiens
tttttttttttttaggagtaccagatgagatagaacatttattttaaaagcacttaagaatttacagtcatattataagaaactagctttgctaatgaatgcataaattctttgtgtctgattttttgataaaacacagtgaatatgacttagagaaaatagcagccacagatacagctaaaatgtgaatgaagctggaggcagctgaggaccacacaccatgaaatgtaaacagaggagaaaaaagctagatgccagacaggaagagaagaaccaggagagcagtctttacaaatagaggtaaatgtaactatgtctgaaagaagaaatctgataggtcttaaagaa

SEQ ID NO: 2979 - DNA, 194 bp, Homo sapiens
atatttaaaaattaatttaatgcttggctaaatcttaattacatatataattatcaaacgatagtccttaatttccaaaaaaattcctcttttgaaaatcacagaatcagaaagcataaacttttaaaccaagttcccctgaatattttaccaatggtgggtattaaccatttataggaagaaccatggaatat

SEQ ID NO: 2980 - DNA, 495 bp, Homo sapiens
tttttgtttttttttttttaactttagaaagcgaattttattagcttcatgagaaacagctgccatgagtcaagacctggatggggatagagctctggtagcttccaaccaatggcgtgaatacagcccacctgttctctctacatccgcagatcagggtcttagtgggggtcccaagaagaacaccccacttccttgccctctcagtgcaggcacagattcagggaatgcattcttgttggaccttaggatctccgtctctatgatatctcactgaacaggaaaatgaatcaaatccacattctagacagccagatgctgacagatttgggatacgagccactgttctggatcatcagccaggaacacaacactttgaatcaccaatcagaaagtcaagattctggaatggcaaataagaaccccctaactttctagcagatttcatcagtagctccacatcctagaatgactgtgttacaaatcaaccagaaa

SEQ ID NO: 2981 - DNA, 202 bp, Homo sapiens
agtttaatcataacacagaaaagcttttattatcatagcaaaatcacttgattcctcatcctttagcaagaagagctggtaagttacaatgttctttggatgggtgagagcactgaatatctgagtttactttcacaaattataacttcaaactaacctttcgaaatcttctgccagctgtaatgccacattaaaagatttc

SEQ ID NO: 2982 - DNA, 387 bp, Homo sapiens
ttttttcaggttttcttgtgtttaatttgaaacgtccagtaacattaaagaacagcatttgatttgcttaaacaaagtagtaacagctgaagttccttccaaatcacttttctgattctctaagaggcttgcctatgccttgcagatctagcttcacctacaagacatattctgtaaggatccaggttcagcaaggtgtcagaatgtcctaagggtttctgtcccggcgctctgcctgtcccgcttgtgcacaatgcttttgcctatccctgtttctgcatagattttagtcttcccaccagggacgcaactgtcagtttcctccgtctctctcggttctattccaatctgctcatctcccctcccgtccccgctttccccaaggac

SEQ ID NO: 2983 - DNA, 335 bp, Homo sapiens
tttttttttttattcaatcaatttttattgagcacatcctacgcacaagacacaatattaggtacagaaaagctataaagataaatgtgacacattctttaccattaataataatatatattatctaaaatttaatttgagctaatatataactgacaatgaaatatttggaccacctaaaacaaggataaattattctgtgacaagtttatattcttgcattatgcaaaaatgattctaaaataaactatttttttcccagaaattgtatgagctatacattgctatgtaacaaattgccccaaatttagcggcgtactacaacaaacacttct

SEQ ID NO: 2984 - DNA, 465 bp, Homo sapiens
tgttggccaggctggtttcgaactcctgacctcgagtgatctgcctgcctcagcctcccaaagtgttgggattacaggtgtgagtcaccgtgcccggccagcaatcagttctctttgtcaactttatttagttgcctgtgggaccctgacattctgtatctgtgctcctatggcctctggagatgtgtgtgaaaattgtctcctcggcccttagcctacttcacctcttgtgctcacaaaaaggggacagagaggagggagaggaatccagcaagatgaagccagcctgagagagcataaaaaccagtcattggtattgtggtcttgcccaaatctttccctcgtgtgaaggaagcctttgacagtgaagtttagaattaaatacagggccagctgaagcatggtgaagccctccaactgcctttgccttgcagagcagtccatcatcagcgagtatgagaagag

SEQ ID NO: 2985 - DNA, 375 bp, Homo sapiens
tttttttttttttttttttttcatggtagcattatttatcatagacaaaaatgaacagaacctagatgtccatcagctgatgaatggataaagaaacatggcatatcatacaatggagtaatttcggccataaaaagaaatgaagtagtactgatacatgctatatcatgaatgaaccttgaaaacatgctaatagaaggaagaaggcagagagggccacatattgtatgattccatttacataaaattcccaaatccatagagacagaaaacagattagtgtttaccgcaggcttgggaaagcagaggtgggaactgactgctcatgggtatggggttcttttggggatgatgaaatagcctgaaattaaatag

SEQ ID NO: 2986 - DNA, 416 bp, Homo sapiens
tttataagattattagtataaaaggggagataggtaggagtagcgtggtaagggcgatgagtgtggggaggagggtgggagatgaggaaaggttggttaatgagtacaaacctatagttagatagaagggaaaagttctatgttcaatagcagagtaggatgactatcattaacaacaatgtattatatcaaaatagctggaagagaggacttgaaatgttcccaacacatagaaatgacaatacttaaagtgatgagtcctaaataccccgacatgatcattatacactctaggcttataagaaaataacatgtatactccataaatatatgcaaatatgtaccaataaagacataacaattaaataaaaagaaaaaatttcacagaacatattttgataaatacattaaaaact

SEQ ID NO: 2987 - DNA, 398 bp, Homo sapiens; identical to SEQ ID NO: 1976

SEQ ID NO: 2988 - DNA, 440 bp, Homo sapiens
  misc_feature (1)..(440): n=a,t,g or c
gatcccaaactgttccctttttcatttcttgaaatgttaccactacagacattttttnaaggtgaataaacagttgtnatgtgctgtacctaaaatcatgtttaatcgtataaggaaacatttcaatacacttatacaggaagaaaactatagatgaagtacatgtgtgtgattcagtctgattcacagaattctgagagtaatatggaataaaacaactccacttagatgataactgaagcatttcctgccttgtgaaaatttggnttttaaattgctgttagaatgggnaatttggacactttatatcattgtatanttncagactttagnttctgtatctnttgggaaccatggttatagcaaaaccnttggnaataatcctgtttccnanaccnccctnnatgtaaacctggtatgcttggctggtaacncctaag

SEQ ID NO: 2989 - DNA, 260 bp, Homo sapiens
  misc_feature (1)..(260): n=a,t,g or c
aaaaaggaatataactgcatttnctttttccaatatgttacagaaaaacattgccctttgactgtcccgttatatattgcagatctcagctactacaaaagatttagttctccatgtgcctcctcaatgctcaaggaggatcacacctgtgtgggtaaattcatggaatactgtgaaacagccaggctccgtaaggaaagtgtgttacaacaggaagtcagtgngcaagggtagtcctccgctagccacgtcacctaatg

SEQ ID NO: 2990 - DNA, 592 bp, Homo sapiens; identical to SEQ ID NO: 1984
  misc_feature (1)..(592): n=a,t,g or c

SEQ ID NO: 2991 - DNA, 430 bp, Homo sapiens
attaaaaaggcattttattataaatacattttagttgtagcagtaaaatacattttgttaccatgaatctttgaaaacaaaagaacttcactgagacaatgagcacactgtaggaactgtagaccccaagttgaaaacttgttctatggaaccaaagtagctaacgtaattccaaaactaagttagaaaagataaagacaaagaaagaagaaaataaaaaccctagagagtggctttggggttattttatggtacaaagtcacttttacttttaaggataaactctttaggtattagagcctcttagatgaggtatcgtttactgcaaagaaaaaaaattgttataattttgccataagttatgcctatttagatggctgtataactggtactttgaagagatgaacctgaccacctcagttttgtacag

SEQ ID NO: 2992 - DNA, 363 bp, Homo sapiens; identical to SEQ ID NO: 129

SEQ ID NO: 2993 - DNA, 401 bp, Homo sapiens
  misc_feature (1)..(401): n=a,t,g or c
agccatacacatgcctttatttagatcagcttttttcaaaatgcagccaaacttatgagttggacagcccaaagtaaccagccctattccactgagttagtttaccccacagcagtagaacccagtgctggtttggttcctggcccatggtgggacagcgtgaaggtgatggagggctctagcacaaggaggtgctgagtgccaccgnagtngcttctgcagacagcctagagcaaggtaagcaggagcactcgcttcagaaccgaggcggctcggaccagaggcaggcactttcctccacattggcaaagggacaagggtttgttcttcctacctcatttgctttactaaagggtcaggctnaggcatgaccgatnaaggatgggtagggggtaaaatgg

SEQ ID NO: 2994 - DNA, 312 bp, Homo sapiens
  misc_feature (1)..(312): n=a,t,g or c
tatcttttaatacatttatttagcaagagaaaaattatcagaaaatgagaagcaccatttatagttcacaagaaatgcaacatggactccaatagaagtagatatcaataactgatacttcctctgtttatgaccccaaacatgctaaaatgctaaagtaatgcttgcaaagaatatgaatgacaaatgttatccagcagctttttggtttaaaatgattgccaatgactagcagcttcaatgggttaacagtaggganggaanaacccttcagtacctaacaacggctgctgtctggctcccaagtgggct

SEQ ID NO: 2995 - DNA, 500 bp, Homo sapiens
  misc_feature (1)..(500): n=a,t,g or c
ctgtctgaatcaactgtacgagttaaacagttttatttcgaaattaaccaacataaacaacaacaacaacaacaacattcactacccattccctcgttaggttggaaaaccagtctgaaaaaataaatacaatctgtgaccatgaaaaggagcaatcacttatttttcccatatgttttgaacattatttttaaaaatagattgggaatctggagggtaaaatgccgggtcccttcccgagcccttagagcccgaacgttgtcgaatcggtcaatgtccaccccgctgctcacctctgtcccagcagcgccggggccagcgcgccctcccgccgcgtctgggagctggcggggaaaagcaggtccccggggggtatcgagtgtccagggatatccacgcagacatccttgtacttgcaaatacaaagaaacacacaggacagagatcaggctcgcgcagggctcgatctcctcggggctcagggttggagggccgtacan

SEQ ID NO: 2996 - DNA, 483 bp, Homo sapiens
  misc_feature (1)..(483): n=a,t,g or c
aaaatttttagccaacttttatttttatgcctagaaaaatacatgggacgtttaggactaatgtgctgggcaatttgctacttagtgatagtaacacaatcctgaaaaggcaagcacaattattctgtacnttttnaaaanntttaattcagcattaagaccataattttttcatatttaaggagtatgaaaaatttggtgggagttttaaaagctgaatacatgtagcgttggatcaaggcacatacaagactggccaaangggcgtacaatgcacctttgggtttttttgttgaaaaaaaaaaaaatcctgggcaaccagaaaangtggtaatggggtttttccacnaaggtaaccagctcaccaatttcnagtagggaagcccagaaaggaaattgttacattaccgagttcctttatataatatcngggaaattgtgacngtaatggggcagtattcctgatccttgtaaaagtaaatt

SEQ ID NO: 2997 - DNA, 192 bp, Homo sapiens
  misc_feature (1)..(192): n=a,t,g or c
ttttttttttaataactgttcagctacaaaattttattggtatctttttatgttccctctagaggatgtaatgcacaaaagcattgccacggaacatataaaattacaaatgaaatttattgtaaaangtagaatgtcttctagactggngtcagtatttatgtcattcataaaccaaaactgctgtataat

SEQ ID NO: 2998 - DNA, 273 bp, Homo sapiens
  misc_feature (1)..(273): n=a,t,g or c
gaaaaaagaaatcacttttattggcttggttttctagcattgctggtgcagtgggggcctgagctggggtgcagtcggcantntcantgggcccgtttgggactgggttgagccatcaggccaccgtgagaaagaagcgactaaaaggcactctgggcccagccaagccctgaaaggccagtggcagganagctgggcgngacaagctcttcccaggngacaagagggacaaaccagggcatctaagctntgctgcctgcgccctnccccgca

SEQ ID NO: 2999 - DNA, 374 bp, Homo sapiens
  misc_feature (1)..(374): n=a,t,g or c
atatttttttttttttttttttttttttttagtttttaaattatctttattctttgacancttacagatctctacacagacatctgtgacccttcagacgttcaggatgccccagagaagggaacatagagcttcctgtctgcattacataaacttttcctaataaatgcatatggntaagttataaggaaggtatagttgtagactaaaccaaatatttttgttttatttttttttgagacaaagtcttgctctatggcccgggctagaacacagtgggtatgatctcagcctgagtgacaggggcaagactccatctaaaaaaaaaaaaaanggaancgggggantcaaatccttaagggcaactgggttaa

SEQ ID NO: 3000 - DNA, 433 bp, Homo sapiens
  misc_feature (1)..(433): n=a,t,g or c
aaanaggaggaaaaaaaagtagatgactccctcaggttaaagagttgtgctattcaacaaataaacttcctcttccgtttcttctctctcctcatctgtgagattcagttgaacattattgaagcggggtcttggtttgccgtctgggccatatgccggagatatctttttttgttataatgccaaggaggcgcccattgtgagttacaaggcactgcctcagtcccagctttcggaaaatatccaccacgatctccattggggtgtgggtctgtcactgtaaaaggggctcatgtcaaggaatgcttcgaagcttcaatgggccgagggactttctgctggggaagagatggggggtntgctgtgcaaaacacaccccgaggaactgcccacgntaccntcttggtttttcccggggattttctntttgcaa

SEQ ID NO: 3001 - DNA, 257 bp, Homo sapiens
  misc_feature (1)..(257): n=a,t,g or c
ccatccaagataactttattccatnttncattatttaataactatttccttcccctccccaccatccaactgcatctcctactctaaaatgcctcttgagcagccaagggtggccagttctgctcctcaattttccagaagaagaatctcagcctgaaagaatatagcgctaggtgacatatgggtggccaaccgtttctcctcaagttccaagagagtgggcatttcgtgaaattccntcagtcatgtttaaagat

SEQ ID NO: 3002 - DNA, 219 bp, Homo sapiens
tttctgaaaacaagtttcatttaaataagggtttaattacattacacataacattacccactgagggggaaaaaaaaaccaaaaaccagttggttacttcacatggcattgggcagttgctgctattaagttgaaagctctacagctagcttacatgactgatggatcagttggagattggcccccttgtcaaaagtttaactctgatagaaggttggc

SEQ ID NO: 3003 - DNA, 399 bp, Homo sapiens
  misc_feature (1)..(399): n=a,t,g or c
tgtagagactgggtcttgctatactgcttaggctggtctcaaacttctggcctcaagcgatcctcctgctgggattacaggtgtgaaccaccacacttgaccccaaattttgttattttttagagacagtgtctcactgtaacccaggctggagggcagtggctcaatcatagctctctgcagccttgaactcctggnntcaagcagtcctcccacctcaagcctcctgagtagctggcactattggcatgtgcaccacgcgcacctaataatttaaaaaatttttttgtagagatgatggagtcttgtttctctgacttatagatcttttctcaccttgtcacagagttttaaaccaaaccctgtctcagaactgtctctgggaaaaatgtttaggga

SEQ ID NO: 3004 - DNA, 407 bp, Homo sapiens
  misc_feature (1)..(407): n=a,t,g or c
gtgcagttgcgatcttggctcattgcagcctacgcctcctgggttcaaacgattctcctgcctcagcctcccaggtagctgggattgcaggcacccgcaccatgcccagccaatttttgtatttttagtagagatgggtttcaccattttggccaggatggtcttgttctcttgaccttgtgatctgccggcctcagcctcccaaagtgttgggattacaggtatgagccactgcgcccggcctcaaacaactaacttttcatttaagtttcagtttcatttatttctgctctgataattattattctgataaatttggggtttgttcttttctcgttctttgaggggatcgttagcttatttgaaatctctactntttttgangtaggcatttattataaacttcc

SEQ ID NO: 3005 - DNA, 250 bp, Homo sapiens
tttttttttttttttttgaaaatactctgggccatttttatagaacatccttttggaaaaaaaaaaaaagtacagatcgatttttttaagtccatcccccaggcgccatcatttaattatgagagggacataaattatgcatcgacacattgttgccttttttgtaggatggcacggggggcttcaccgtttcagggatcgcgcctccctccagctcactctgcccctggaggggtccgcggacgccggg

SEQ ID NO: 3006 - DNA, 135 bp, Homo sapiens
agtgtatgacgccatttatacgaaacgtccagaataggcaaatccatacctattctgagtggttactggggtgggggagttggatggggacagctaaggagtgtagggtgtcttcttgggctgatgaaaatgtcg

SEQ ID NO: 3007 - DNA, 448 bp, Homo sapiens
taagtttttcaaattctagattaaaaacaccatcagtaacaaaattatgaatacttatttacaaataagacattttccattagcatgacacatgacagttttcatgataaaatcagtatagaggagtatgtgcaattttgcataagtaataaaaacattcaaactatcaatgccctgatagcacgaataagttccaccaggcatctcttttgactttacagttttttatttccttttcttcatatatccttgatgttgctgagaagaaactgaactttgcacaacagcagaaaagtctagttagtcgcgggtacaggctctttcttttttttttttttttgagacggagctcaacgctctgtcacccaggctggagtgcagtggctcgatctcggctcactgcaacctcacctcccaggctcaagcgattctcctgcctcgtgccgaa

SEQ ID NO: 3008 - DNA, 547 bp, Homo sapiens
  misc_feature (1)..(547): n=a,t,g or c
cggttttatctgttgttatttttttgttgtttaattgaaatggggtctattccacactgcccactgcactgcatgcntattcacaggcttgctcctggctcaccgcagcctctgactcccaggcccaggcaatcctcccgcctcagcctccgagtagctgggactacaggcatgagccaccatacctggcttaaaaaaaattcattacagcactaattcagtggagagaaataaatcaatactcattaaatctaatgagagagtgtctgtgcactatttgtaagtattcttaaatgactaaatgaaaaagatgaaaagtaaatatcccaaacagctaacagtagatgcatatcctctgggtgccgaggtaagagtggatgtatgaatgcacacacacacgcatgcacatacacacgcacacacacacacctttctacaaatgtggcagataaacatggagaccaacactcacatctacagggcatttcactcacccccaaacctctctacgaagaccagaaaaagatgtttaataaccactcgggcc

SEQ ID NO: 3009 - DNA, 4069 bp, Homo sapiens
ggcgtctgggaagtgaggagcgtctctgcctggcagaggctgcaatctctgcactttggggggccaaggcaggcgctgagaaggacgcgcagtccatctctctcaggttagtgaaatgaggctctccgcggggccggcccggggacagtgcgctgctggtcccagcatgaatgcgggccccggctgtgaaccctgcaccaaagcgacccgctggggcgccgctacaacttcgccggctgcttcggacgcccggagctttccgagcaggcagaggcgcgtcctcgaccccaaggacgctcacgtgcagttcagggtcccaccgtcctcgccagcctgcgtcccagggcaggcgggacagcacagaggcagcgccacctcgcttgttttcaaacaaaagactattaccagttggatggacactaaaggaatcaagacagcggaatcagaaagtttggatagtaaagaaaacaacaatacaagaatagaatccatgatgagttctgtacaaaaagataacttttaccaacataatgtagaaaaattagtaaatgtttctcagctaagtcttgataagtcactcactgaaaaaagtacacagtatttgaaccagcatcagactgcagcaatgtgtaagtggcaaaatgaagggaaacacacggagcagcttttggaaagtgaacctcaaacagtaaccctggtaccagagcagtttagtaatgctaacattgatcggtcacctcaaaatgatgatcacagtgacacagatagtgaagagaatagagacaatcaacagtttctcacaactgtaaagcttgcaaatgcaaagcagactacggaagatgaacacgccagagaagccaaaagccaccagaagtgcagcaagtcttgccatcctggggaagactgtgcaagttgtcagcaagatgagatagacgtggtgccaaagagtccattgtcagatgttggctctgaggatgttggtactgggtcaaaaaatgacaacaaattgattagacaagaaagttgcctaggaaattctcctccatttgagaaggaaagtgaacccgaatcaccgatggatgtggataattctaaaaatagttgtcaagactcagaagcagatgaggagacaagtccaggttttgatgaacaagaagatggtagttcctcccaaacagcaaataaaccttcaaggttccaagcaagagacgctgacattgaatttaggaaacggtactctactaagggcggtgaagttagattacatttccaatttgaaggaggagagagtcgcactggaatgaatgatttaaatgctaaactacctggaaatatttctagcctgaatgtagaatgcagaaattctaagcaacatggaaaaaaggattctaaaatcacagatcatttgatgagactgcccaaagcagaggacagaagaaaagaacagtgggaaaccaaacatcaaagaacagaaaggaagatccctaaatacgttccacctcacctttctccagataagaagtggcttggaactcccattgaggagatgagaagaatgcctcggtgtgggatccggctgcctctcttgagaccatctgccaatcacacagtaactattcgggtagatcttttgcgagcaggagaagttcctaaaccttttccaacacattataaagatttgtgggataacaagcatgttaaaatgccttgttcagaacaaaatttgtacccagtggaagatgagaatggtgagcgaactgcggggagccggtgggagctcattcagactgcacttctcaacaaatttacacgaccccaaaacttgaaggatgctattctgaaatacaatgtggcatattctaagaaatgggactttacagctttgatcgatttctgggataaggtacttgaagaagcagaagctcaacatttatatcagtccatcttgcctgatatggtgaaaattgcactctgtctgccaaatatttgcacccagccaataccactcctgaaacagaagatgaatcattccatcacaatgtcgcaggaacagattgccagtcttttagctaatgctttcttctgcacatttccacgacgaaatgctaagatgaaatcggagtattctagttacccagacattaacttcaatcgattgtttgagggacgttcatcaaggaaaccggagaaacttaaaacgctcttctgctactttagaagagtcacagagaaaaaacctactgggttggtgacatttacaagacagagtcttgaagattttccagaatgggaaagatgtgaaaaacccttgacacgattgcatgtcacttacgaaggtaccatagaagaaaatggccaaggcatgctacaggtggattttgcaaatcgttttgttggaggtggtgtaaccagtgcaggacttgtgcaagaagaaatccgctttttaatcaatcctgagttgattatttcacggctcttcactgaggtgctggatcacaatgaatgtctaattatcacaggtactgagcagtacagtgaatacacaggctatgctgagacatatcgttggtcccggagccacgaagatgggagtgaaagggacgactgcgagcggcgctgcactgagatcgttgccatcgatgctcttcacttcagacgctacctcgatcagtttgtgcctgagaaaatgagacgcgagctgaacaaggcttactgtggatttctccgtcctggagtttcttcagagaatctttctgcagtggccacaggaaactggggctgtggtgcctttgggggtgatgccaggttaaaagccttaatacagatattggcagctgctgcagctgagcgagatgtggtttatttcacctttggggactcagaattgatgagagacatttacagcatgcacattttccttactgaaaggaaactcactgttggagatgtgtataagctgttgctacgatactacaatgaagaatgcagaaactgttccacccctggaccagacatcaagctttatccattcatataccatgctgtcgagtcctgtgcagagaccgctgaccattcagggcaaaggacagggacctgaggagccgagcgaatagcatctcctcccacctcccaccagagacgtcctgtttgagctgtcaggtgtaatatatgaattgacttaagttaatataaatgtgtacataatccacatttgtagtcaaggacgcaatctcttccacacatgtgcagttgtcagttggtacatctaaactccctccatcctgactcacgtggacttagatatgttttgtttctattttcttctatttcagtttttcattctttgatgtttatttcttttgtccatcagatctcttgtgaaatcccatggaaggttgtgctcagctgtcgggtctctttcttcctgcccatatattataccagttgcttctgcagcccgcagatgcccagcgatgcccaggaaacaagttgaaatcccaggaatctctttaactgattttgctaaaaatctccctgtgagccttccactcaactcttaatatgcttgcattgtttaagtttttaaattctgaaaattaataattagggtttttttcatatgtgttgcataatgcaaacctcctaggttaaaatagtttctttatttaagatagaataatttccagaaattgtacttttgaggtatcatttttatctgtaatggtttgtctgtcttttttcctctgatcagtatttttttataccagttttggagactgcctgagatgaaaggaaatgtggaataaaaggaggttttcctgatgtggtgtaaagaaaacagattccaagagaattgaagattttttttgtttccttggtacttttttctttttaaattaggactaatgtttcttttgtggtgcttgaggcatattcatataaccaaagtttgagaactgggaacttcatgctgatttgtacatattgaagtttctctggtattcaaaggttatatagtgaatgaattttcattaataaatcactttgtcagaaaaaaaaaaaaaaaaaa

SEQ ID NO: 3010 - DNA, 1696 bp, Homo sapiens
gcatcccggcatctgcacgtggttatgctgccggagtttgggccgccactgtaggaaaagtaacttcagctgcagccccaaagcgagtgagccgagccggagccatggagggccagagcgtggaggagctgctcgcaaaggcagagcaggacgaggcagagaagttgcaacgcatcacggtgcacaaggagctggagctgcagtttgacctgggcaacctgctggcgtcggaccggaaccccccgaccgggctgcggtgcgccggacccacgccggaggccgagctacaggccctggcgcgggacaacacgcaactgctcatcaaccagctgtggcagctgcccacggagcgcgtggaagaggcgatagtggcgcggctgccggagcccaccacacgcctgccgcgagagaagcctctgccccgaccgcggccacttacacgctggcagcagttcgcgcgcctcaagggcatccgtcccaagaagaagaccaacctggtgtgggacgaggtgagtggccagtggcggcggcgctggggctaccagcgcgcccgggacgacaccaaagaatggctgattgaggtgcccggcaatgccgaccccttggaggaccagttcgccaagcggattcaggccaagaaggaaagggtggccaagaacgagctgaaccggctgcgtaacctggcccgcgcgcacaagatgcagctgcccagcgcggccggcttgcaccctaccggacaccagagtaaggaggagctgggccgcgccatgcaagtggccaaggtctccaccgcctctgtggggcgctttcaggagcgcctccccaaggagaaggtgccccggggctccggcaagaaaaggaagtttcaaccccttttcggggactttgcagccgagaaaaagaaccagttggagctgcttcgtgtcatgaacagcaagaagcctcagctggatgtgactagggccaccaataagcagatgagggaggaggaccaggaggaggccgccaagaggaggaaaatgagccagaagggcaagagaaagggaggccggcaggggcctgggggcaagaggaaagggggcccgcccagccagggagggaagaggaaagggggcttgggaggcaagatgaattctgggccgcctggcttgggtggcaagagaaaaggaggacagcgcccaggaggaaagaggaggaagtaatagtttctaactgtcggacccgtctgtaaaccaaggactatgaatactaaatgttaagttctaggcaattatacggggactcagaaggacctggccgctgccttcattgagtttaaagggacaggattgcccttccgtcaagaaagtatgtaagtgttggactgcacaaattaatgtttttcccacaaccgagactttggagattaagaacttatttgaggatttaagaattagggaaataatttggtggaaaccgggaatgagttctattcttaaacagcctttttttttctttttaatgttggatatacggcgaggtagagttggccatatttcagagacttagattgacgtatatgtttctgcattatttttacaacaagtttgtgtatcagagcgggagttcgggggagggaaagaaaacaaacagtttcagaattgaataggcaagtgactgttttaaagattaagtaataaagatgtcttatctagtg

SEQ ID NO: 3011 - DNA, 1685 bp, Homo sapiens
cctgaaaagccacctcagattcagccaacaaagattgctgatttgctccttaagcaagagattcactgctgctcagcatggctcagaccaactcatgcttcatgctgatctcctgcctgatgttcctgtctctgagccaaggacaggaggcccatgctgagttgcccaaggcccagatcagctgcccagaaggcaccagtgcctaaggctcccactgctactactttaatgaagagcatgagacctgggtttatgcagatctctactgccagaacatgaattcaggtaacctggtgtctgtgctcacccaggctgagggtgcctttgtggcttcgctgattaaagagagtggcaccaaggatagcaatgtctggattggcctccatgacccccaccggatcagtctgctgcatcttctacctcctgattatcaggttccagagggtctgatgtctggcacctcaagcatcagtttttactatattatgataaaagcaacctctctataaatcatataatgtaaaggatatcaaggttctccataggttcttcgagataagcttaaagctgaatttcctgtgtgtttcaggcattcacagataaactcattctctgtacttctagggtagcatctttatgtatctattatgtacctcttatctattgtgttatcatctctgttatagaagagccttctgtagaccatatagaaaaagattatagaggaggagaatctactgctggcaattgggaaccgcaaggtatactaaataatatatcaacaactaatggccatctaatgctatgctggatatgaacttttggggcctcaggaaagaaaaaccaggaactagtttcaataatgaggtgtcatggttccctgtggcaaatttagaacacttatcgtttggcaggacacagagaggtaggtgaacattccaggaaagaagcagcttagagaaaatgtggaggaaataatatgacacttagagaaaaaggaaggtttattcttgtcttatgtcttgacctgtttctgagtgcgaacacaaaccaggtgtttctgtctctttctgagtcacgtctgcccctgttctggcccttccccatctagaactgccattatcagtggagtagtgggtccctggtctcctacaaatcctgggacattggatccccaagctgtgccaatactgcctactgtgctagcctgacttcaagctcaggtgagaggcacagaatccacacacttattgccatcctctcctatttatctctgaggatcgaccggggactgggatagaggaagggtgagctcctcattcaggaaatagaggagtgtttcctctttatttttgctgagtcctgcagccaggagggtaatacactctgatcccctcagtctgaatcttctcattgtcttataggattcaagaaatggaaggatgattcttgtaaggagaagttctcctttgtttgcaagttcaaatactggaggcaattgtaaaatggacgtctagaattggtctaccagttactatggagtaaaagaattaaactggaccatctctctccatatcaatctggaccatctctcctctgctaaatttgcatgactgatctttagtatctttacctacctcaatttctggagccctaaacaataaaaataaacatgtttcccccat

SEQ ID NO: 3012 - DNA, 2718 bp, Homo sapiens
gaattccgctaagggatcagaaaactcgctggttaatgagtggccaagaacatatcagcttaagtttgggaaaaacacacaacagggcattgtgtcagagggtgaccaaagtgactccccagcagatggaccagggaacgaacaggtgacctttgaactgaggccggagtggaagcagcgagggtgtgaagggccgggtgagggtcaaaggcagaagcaagcaggtggggagggttagcgtcatgcctgctaaggagcagtggacgggtcctagcacgtcctgtgagccacccgctgtccagggagcggttacctctgtcttgccagcttcgtggggacagatagttcagctcatcatttatgagacagagaatgggaatttggagggtctgtggctggcctcgtcctgggtgcgcagggggtcacctgaggtgtggtctgaggcctccggggaagggcatttctttgcaggacgcagtttccaggctcaagagcgtggagggaattcctaagggtcgctcttcaccaagagcgcagagccctggtagacctcagcatcgtcacagagaaagctgtgggtgcagaggccttggggacaaggcggggacggaatttcgtatttcagatgaccaaggccaatggccaagtgtgagttcttcaacgcgggcgggagcgtgaaggaccgcatcagcctgcggatgattgaggatgctgagcgcgacgggacgctgaagcccggggacacgattatcgagccgacatccgggaacaccgggatcgggctggccctggctgcggcagtgaggggctatcgctgcatcatcgtgatgccagagaagatgagctccgagaaggtggacgtcctgcgggcactggggcctgagattgtgaggacgcccaccaatgccaggttcgactccccggagtcacacgtgggggtgtcctgccgtctgaagaacgaaatccccaattctcacatcctagaccagtaccgcaacgccagcaaccccctggctcactatgacaccaccgctgatgagatcctgcagcagtgtgatgggaagctggacatgctggtggcttcagtgggcacgggcggcaccatcacgggcattgccaggaagctgaaggagaagtgtcctggatgcaggatcattggggtggatcccgaagggtccatcctcgcagagccggaggagctgaaccagacggagcagacaacctacgaggtggaagggatcggctacgacttcatcaccacggtgctggacaggacggtggtggacaagtggttcaagagcaacgatgaggaggcgttcacctttgcccgcatgctgatcgcgcaagaggggctgctgtgcggtggcagtgctgacagcacggtggcggtggccgtgaaggctgcgcaggagctgcaggagggccagcgctgcgtggtcattctgcccgactcagtgcggaactacatgaccaagttcctgagcgacaggtggatgctgcagaagggctttctgaaggaggaggacctcacggagaagaagccctggtggtggcacctccgtgttcaggagctgggcctgtcagccccgctgaccgtgctcccgaccatcacctgtgggcacaccatcgagatcctccgggagaagggcttcgaccaggcgcccgtggtggatgaggcgggggtaatcctgggaatggtgacgcttgggaacatgctctcgtccctgcttgccgggaaggtgcagccgtcagaccaagttggcaaagtcatctacaagcagttcaaacagatccgcctcacggacacgctgggcaggctctcgcacatcctggagatggaccacttcgccctggtggtgcacgagcagatccagtaccacagcaccgggaagtccagtcagcggcagatggtgttcggggtggtcaccgccattgacttgctgaacttcgtggccgcccaggagcgggaccagaagtgaagtccggagcgctgggcggtgcggagcgggcccgccacccttgcccacttctccttcgctttcctgagccctaaacacacgcgtgattggtaactgcctggcctggcaccgttatccctgcacacggcacagagcatccgtctcccctcgttaacacatggcttcctaaatggccctgtttacggcctatgagatgaaatatgtgattttctctaatgtaacttcctcttaggatgtttcaccaaggaaatattgagagagaagtcggccaggtaggatgaacacaggcaatgactgcgcagagtggattaaaggcaaaagagagaagagtccaggaaggggcggggagaagcctgggtggctcagcatccctccacgggctgccccgtctgctcggggctgagctggcgggagcagtttgcgtgtttgggttttttaattgagatgaaattcaaataacctaaaaatcaatcacttgaaagtgaacaatcagcggcatttagtacatccagaaagttgtgtaggcaccacctctgtcacgttctggaacattctgtcatcaccccgtgaagcaatcatttcccctcccgtcttcctcctcccctggcaactgctgatcgactttgtgtctctgttgtctaaaataggttttccctgttctggacatttcatataaatggaatcacaccaaaaaaaaaaaaaaaaaaaaaaaaaaaaaaaaaaaaaaaaaacggaattc

SEQ ID NO: 3013 - DNA, 748 bp, Homo sapiens
caagacaacattttaggcaaaatcagcctgagcaagatgtgctgaagatgggaagcgtctgagttgatctgtgcaccttttcttgtctcccctcgttctagggagattcgggaggccctctgtcctgcaaacacaatgaggtctggcatctggtaggcatcacgagctggggcgaaggctgtgctcaaagggagcggccaggtgtttacaccaacgtggtcgagtacgtggactggattctggagaaaactcaagcagtgtgaatgggttcccaggggccattggagtccctgaaggacccaggatttgctgggagagggtgttgagttcactgtgccagcatgcttcctccacagtaacacgctgaaggggcttggtgtttgtaagaaaatgctagaagaaaacaaactgtcacaagttgttatgtccaaaactcccgttctatgatcgttgtagtttgtttgagcattcagtctctttgtttttgatcacgcttctatggagtccaagaattaccataaggcaatgtttctgaagattactatataggcagatataccagaaaataaccaagtagtggcagtggggatcaggcagaagaactggtaaaagaagccaccataaatagatttgttcgatgaaagatgaaaactggaagaaaggagaacaaagacagtcttcaccattttgcaggaatctacactctgcctatgtgaacacatttcttttgtaaagaaagaatttgatt

SEQ ID NO: 3014 - DNA, 338 bp, Homo sapiens
gagagcatcactcagcgcatggcaataatagaaggaaagaataagatggctagcaccttggttgtggctgactctagaatttctggaatctacatttgcatagcttccaataaagttgggactgtgggaagaaacataagcttttatatcacagaattgtcaaactttgagtgccttcatccttgctctcaggaatagaactctacctcatcggatctcatgtgccaaatgggtttcatgttaacttggaaaaaatgccgacggaaggagaggacctgaaactgtcttgcacagttaacaagttcttatacagagacgttacttggattttactgcgg

SEQ ID NO: 3015 - DNA, 1424 bp, Homo sapiens; identical to SEQ ID NO: 1433

SEQ ID NO: 3016 - DNA, 1306 bp, Homo sapiens
ggccatgaggttgatcctgttttttggtgccctttttgggcatatctactgtctagaaacatttgtgggagaccaagttcttgagattgtaccaagcaatgaagaacaaattaaaaatctgctacaattggaggctcaagaacatctccagcttgatttttggaaatcacccaccaccccaggggagacagcccacgtccgagttcccttcgtcaacgtccaggcagtcaaagtgttcttggagtcccagggaattgcctattccatcatgattgaagacgtgcaggtcctgttggacaaagagaatgaagaaatgctttttaataggagaagagaacggagtggtaacttcaattttggggcctaccataccctggaagagatttcccaagaaatggataacctcgtggctgagcaccctggtctagtgagcaaagtgaatattggctcttcttttgagaaccggcctatgaacgtgctcaagttcagcaccggaggagacaagccagctatctggctggatgctgggatccatgctcgagagtgggttacacaagctacggcactttggacagcaaataagattgtttctgattatggaaaggacccatccatcacttccattctggacgccctggatatcttcctcctgccagtcacaaaccctgatggatacgtgttctctcaaaccaaaaatcgtatgtggcggaagacccggtccaaggtatctggaagcctctgtgttggtgtggatcctaaccggaactgggatgcaggttttggaggacctggagccagcagcaacccttgctctgattcataccacggacccagtgccaactctgaagttgaagtgaaatccatagtggacttcatcaagagtcatggaaaagtcaaggccttcattatcctccacagctattcccagctgctgatgttcccctatgggtacaaatgtaccaagttagatgactttgatgagctgagtgaagtggcccaaaaggctgcccaatctctgagaagcctgcatggcaccaagtacaaagtgggaccaatctgctctgtcatctaccaagccagtggaggaagcattgactggtcctatgattatggcatcaagtactcatttgcctttgaactgagagacacagggcgctacggcttcctcttgccagcccgtcagatcctgcccacagccgaggagacctggcttggcttgaaggcaatcatggagcatgtgcgagaccacccctattagggccctggggaagaaacaagagccattaaaatctctttggtttgaagc

SEQ ID NO: 3017 - DNA, 1800 bp, Homo sapiens; identical to SEQ ID NO: 256

SEQ ID NO: 3018 - DNA, 3337 bp, Homo sapiens
gtcgagcctctagcccgcccgggtttccttcgcagtcgcgcaccgacgctcaaacgcgcgctccaacccgcagcctcctcctgcctcaccgcccgaagatggcggctctcaaactcctctcctccgggcttcggctctgcgcctctgcccgcggatctggggcaacctggtacaagggatgtgtttgttccttttccaccagtgctcatcgccataccaagttttatacagatccagtagaagctgtaaaagacatccctgatggtgccacggttttggttggtggttttgggctatgtggaattccagagaatcttatagatgctttactgaaaactggagtaaaaggactaactgcagtcagcaacaatgcaggggttgacaattttggtttggggcttttgcttcggtcgaagcagataaaacgcatggtctcttcatatgtgggagaaaatgcagaatttgaacgacagtacttatctggtgaattagaagtggagctgacaccacagggcacacttgcagagaggatccgtgcaggcggggctggagttcctgcattttacaccccaacagggtatgggaccctggtacaagaaggaggatcgcccatcaaatacaacaaagatggcagtgttgccattgccagtaagccaagagaggtgagggagttcaatggtcagcactttattttggaggaagcaattacaggggattttgctttggtgaaagcctggaaggcggaccgagcaggaaacgtgattttcaggaaaagtgcaaggaatttcaacttgccaatgtgcaaagctgcagaaaccacagtggtagaggttgaagaaattgtggatattggagcatttgctccagaagacatccatattcctcagatttatgtacatcgccttataaagggagaaaaatatgagaaaagaattgagcgtttatcaatccggaaagagggagatggggaagccaaatctgctaaacctggagatgacgtaagggaacgaatcatcaagagggccgctcttgagtttgaggatggcatgtatgctaatttgggcataggaatccctctcctggccagcaattttatcagcccaaatataactgttcatcttcaaagtgaaaatggagttctgggtttgggtccatatccacgacaacatgaagctgatgcagatctcatcaatgcaggcaaggaaacagttactattcttccaggagcctcttttttctccagcgatgaatcatttgcaatgattagaggtggacacgtcgatctgacaatgctaggagcgatgcaggtttccaaatatggtgacctggctaactggatgatacctgggaagatggtgaaaggaatgggaggtgctatggatttagtgtccagtgcgaaaaccaaagtggtggtcaccatggagcattctgcaaagggaaatgcacataaaatcatggagaaatgtacattaccattgactggaaagcaatgtgtcaaccgcattattactgaaaaggctgtgtttgatgtggacaagaagaaagggttgactctgattgagctctgggaaggcctgacagtggatgacgtacaaaagagtactgggtgtgattttgcagtttcaccaaaactcatgccaatgcagcagatcgcaaattgaaatatggatatttgtaccaggctgcgtgtttttcattttaaacacacaagatttaattgaaaggacatcaataatcataattgtgtatttaacaggtggttttttattagttttcttgtgtttcagactttatgcagccatataaactgttctctaggcatgctgtgacattttaataaaaagcaaaaggagcatttataattatctcatttgttaaggctgagaaggttgtttttataataggtaattatattgaatgcattttcactgaatatggtatgtatgctaaattatatgaacctttccccaagaagggccctagaaattgatgtggctttcctcttaaatattaattattagtcctgaaagaaagataacatatgtgatttttgtggttaggagagttgctgtcatgattgttttttcttcagcctcctctgacttttcttttggggcttcagattttatgattacatcttgtccccctagaacatcccccttcctcccatactgcttttaaacagatgcccaagaaggcaagcaggaatgcctcttgtgggggagggcagggagaaataactagttcaaaccaactatctatctatgctttgcaaagactaaggcgtattataggaagagggctagaaacctaactgattcttctcagttttctcattttaaaacagcccagtattcctttgtatcctcaagggtccttgagaatacttctgttattgaaaccctgtgggctacttgtactgtacctcctctcaagccaagaagggctgtgggataatttaccatgaatccttagtagcaatgacagcagagttaaaaaataaaaggtgttttactttcaggctcttgttttggttcagaggagattttaaatattgaatgacacttctacagaacaacggtttttcttctgccaaggctacttcctttaacgaagtgcctttaattcagccttatccaactagggaaaataatgttggacaagtctaggatttgaagagtcagtgaacttttagtgtcagggaataaacatggtgggtagattaggtttgaaaaaaacttccttagaggtatttattctcaatacctgacaggggcccatgggaatgacttcagaagcatcccggataatagatgggtaaaaagtctaggcaccctgaagaacaggtgagacagctggcctctggacagaggtaggcatagtacagtacgatatatcattcctctggtcctaaatatacaaacttattcatgtttttaggtgatgatggtcattgaaactcacttcttttcaggtgtagctacaattgtgtaatgtacaatattagagaaaggacaggctttttatgagtaacacacaccatatataaaacagcctttctggctgaccacatggttaaatgcataccttcccagtactggggggaaaatgacccttcttagaatgtgcaagttccatagagtaatatattgatatgattttgaaaagaattgttgatagttacatcttcaaacttatcattccagtatgcatctttaagataatgtgattctaagtagatgactttatattcttgattaaagagtgctatacatgttaagaaatgcattaaggaatacaataaatattctaaactgatgaaaaaaaaaaaaaaaaa

SEQ ID NO: 3019 - DNA, 1648 bp, Homo sapiens; identical to SEQ ID NO: 2437

SEQ ID NO: 3020 - DNA, 144 bp, Homo sapiens
cattgtccagctccaagatggtatcccgtaaggctgtggctgctctgctggtggtgcatgtagctgccatgctggcctcccagacggaagccttcgtccccatcttcacctatggcgaactccagaggatgcaggtaaagaacc

SEQ ID NO: 3021 - DNA, 7878 bp, Homo sapiens
ctaaaaataccattaagtaatagtattagcttttgtattctgagattcaacagcagcagtcacttccctccactcctatgtgtatcccaggaccaccctgggcggggagggctgaggtcagggaggtctgaagctggtcctgggctccgggggtgacagtgatgaggaactgggtgcacacatgagtggggcagccgggcctggccagagaagcaacacacacgtgcacagacatgtttatccacatacacatgtgcacgcatgtgcacaaacacattgcaggcaggcatgttgacgcctcaggcagcggaggaccctgactctgggccctgctgacccgggcaaggcccattgtgatgcgtgccatgacctcagaatgtcactggtgcttagcacctatccgctctccagactgcgtctgtgttctacggcagttacacacacgcagtggtattcacaagcggttttgtggactcaaaggttttctccctgagaggcataacccaggccagctgattcatcagaatcaggtgagtgtgacctgctctcttccctccaggctgacttggggacagtggctatggtatgggcggtgttggcctctgggcagctacagaggagggtcatccctgagcactcaccgggcgcccgttctacactgcccatgtagacgattttctctttcgtcttcatggtggcttcgtagagtgggtgctgttcccaaatgtacccattcgacaggtgagccgtctggggtcagagaggcagtaactggcctgggaatccagacaagaccctgggttttgctctcagccctgctgtgtgccatgctagacttcaggcctcaaccctgagacctccctgctctagatcccaaatctgcccagatttccgatccaatgggcagagcctggccctggcagagacactgggatggatccactgtgggtggggaggagggaagggtcctcagaacacacctggggcctaagctgggtcttgatggtcactgtgggacccactggacacacacagtcccttgtctgggagtggcatggggagccttctgcccttgggcagttgtggaaagtgaaggagccctggagagctggctgaggggagactatcttcccttgtgttcaaaggggtccaggcactggggctctccccaagtatttcttattctgtctggcctcgctttccttttgccctgagtattctcaggagggacggtccatctagatgtcctccaggagcaaggacccactgttcttcatcagtgacccaggaaaatgaagccccctcctgtggggacagctcagaatggtggagtccacagtccctccctgagagacatggtttccatgagcacagtggctgctttggagacagtaatcattttcatccccaaaaccaaacacactcctgctcaaatggtgttattgctaaagcagcttcactggttagactgaagggccatggtagcccaagtgatgagcggggtagaatggagcagtcaggagagatcttgttccccgtaggaaactgggcatctctgtggccctgaacatcccaggaggccgatcgtacagagacctctggtgcctgaccgcagttcacatccacatccctggaatagaccatcacaggctcttcacccttggcaggtggacaccattcaacctgccggggcaggatggacatggtagagaatgcagatagtttgcaggcacaggagcggaaggacatacttatgaagtatgacaagggacaccgagctgggctgccagaggacaaggggcctgagcccgttggaatcaacagcagcattgatcgttttggcattttgcatgagacggagctgcctcctgtgactgcacgggaggcgaagaaaattcggcgggagatgacacgaacgagcaagtggatggaaatgctgggagaatgggagacatataagcacagtagcaaactcatagatcgagtgtacaagggaattcccatgaacatccggggcccggtgtggtcagtcctcctgaacattcaggaaatcaagttgaaaaaccccggaagataccagatcatgaaggagaggggcaagaggtcatctgaacacatccaccacatcgacctggacgtgaggacgactctccggaaccatgtcttctttagggatcgatatggagccaagcagagggaactattctacatcctcctggcctattcggagtataacccggaggtgggctactgcagggacctgagccacatcaccgccttgttcctcctttatctgcctgaggaggacgcattctgggcactggtgcagctgctggccagtgagaggcactccctgccaggattccacagcccaaatggtgggacagtccaggggctccaagaccaacaggagcatgtggtacccaagtcacaacccaagaccatgtggcatcaggacaaggaaggtctatgcgggcagtgtgcctcgttaggctgccttctccggaacctgattgacgggatctctctcgggctcaccctgcgcctgtgggacgtgtatttggtggaaggagaacaggtgttgatgccaataaccagcattgctcttaaggttcagcagaagcgcctcatgaagacatccaggtgtggcctgtgggcacgtctgcggaaccaattcttcgatacctgggccatgaacgatgacaccgtgctcaagcatcttagggcctctacgaagaaactaacaaggaagcaaggggacctgccacccccagccaaacgcgagcaagggtccttggcacccaggcctgtgccggcttcacgtggtgggaagaccctctgcaaggggtataggcaggcccctccaggcccaccagcccagttccagcggcccatttgctcagcttccccgccatgggcatctcgtttttccacgccctgtcctggtggggctgtccgggaagacacgtaccctgtgggcactcagggtgtgcccagcctggccctggctcagggaggacctcagggttcctggagattcctggagtggaagtcaatgccccggctcccaacggacctggatatagggggcccttggttcccccattatgattttgaacggagctgctgggtccgtgccatatcccaggaggaccagctggccacctgctggcaggctgaacactgcggagaggttcacaacaaagatatgagttggcctgaggagatgtcttttacagcaaatagtagtaaaatagatagacaaaaggttcccacagaaaagggagccacaggtctaagcaacctgggaaacacatgcttcatgaactcaagcatccagtgcgttagtaacacacagccactgacacagtattttatctcagggagacatctttatgaactcaacaggacaaatcccattggtatgaaggggcatatggctaaatgctatggtgatttagtgcaggaactctggagtggaactcagaagagtgttgccccattaaagcttcggcggaccatagcaaaatatgctcccaagtttgatgggtttcagcaacaagactcccaagaacttctggcttttctcttggatggtcttcatgaagatctcaaccgagtccatgaaaagccatatgtggaactgaaggacagtgatggccgaccagactgggaagtagctgcagaggcctgggacaaccatctaagaagaaatagatcaattattgtggatttgttccatgggcagctaagatctcaagtcaaatgcaagacatgtgggcatataagtgtccgatttgaccctttcaattttttgtctttgccactaccaatggacagttacatggacttagaaataacagtgattaagttagatggtactacccctgtacggtatggactaagactgaatatggatgaaaagtacacaggtttaaaaaaacagctgagggatctctgtggacttaattcagaacaaatcctactagcagaagtacatgattccaacataaagatttctcctcttcaccatctacaaatggaatgttcaccctaactaccaatggggacctacccaaaccaatattcatccccaatggaatgccaaacactgttgtgccatgtggaactgagaagaacttcacaaatggaatggttaatggtcacatgccatctcttcctgacagcccctttacaggttacatcattgcagtccaccgaaaaatgatgaggacagaactgtatttcctgtcacctcaggagaatcgccccagcctctttggaatgccattgattgttccatgcactgtgcatacccagaagaaagacctatatgatgcggtttggattcaagtatcctggttagcaagaccactcccacctcaggaagctagtattcatgcccaggatcgtgataactgtatgggctatcaatatccattcactctacgagttgtgcagaaagatgggatctcctgtgcttggtgcccacagtatagattttgcagaggctgtaaaattgattgtggggaagacagagctttcattggaaatgcctatattgctgtggattggcaccccacagcccttcaccttcgctatcaaacatcccaggaaagggttgtagataagcatgagagtgtggagcagagtcggcgagcgcaagccgagcccatcaacctggacagctgtctccgtgctttcaccagtgaggaagagctaggggaaagtgagatgtactactgttccaagtgtaagacccactgcttagcaacaaagaagctggatctctggaggcttccacccttcctgattattcaccttaagcgatttcaatttgtaaatgatcagtggataaaatcacagaaaattgtcagatttcttcgggaaagttttgatccgagtgcttttttggtaccacgagacccggccctctgccagcataaaccactcacaccccagggggatgagctctccaagcccaggattctggcaagagaggtgaagaaagtggatgcgcagagttcggctggaaaagaggacatgctcctaagcaaaagcccatcttcactcagcgctaacatcagcagcagcccaaaaggttctccttcttcatcaagaaaaagtggaaccagctgtccctccagcaaaaacagcagccctaatagcagcccacggactttggggaggagcaaagggaggctccggctgccccagattggcagcaaaaataagccgtcaagtagtaagaagaacttggatgccagcaaagagaatggggctgggcagatctgtgagctggctgacgccttgagccgagggcatatgcgggggggcagccaaccagagctggtcactcctcaggaccatgaggtagctttggccaatggattcctttatgagcatgaagcatgtggcaatggctgtggcgatggctacagcaatggtcagcttggaaaccacagtgaagaagacagcactgatgaccaaagagaagacactcatattaagcctatttataatctatatgcaatttcatgccattcaggaattctgagtgggggccattacatcacttatgccaaaaacccaaactgcaagtggtactgttataatgacagcagctgtgaggaacttcaccctgatgaaattgacaccgactctgcctacattcttttctatgagcagcaggggatagactacgcacaatttctgccaaagattgatggcaaaaagatggcagacacaagcagtacggatgaagactctgagtctgattacgaaaagtactctatgttacagtaaagctaccactctggctgctagacagcttggtggcgagggagatgactccttgtagctgatacttggcaaaagtgtcactgaaagacaagctaaatgtagttattttatcctgttagaacaaaaattctaattaaaatagttaacttgaagagtagaaacaattgtattttgaagtctcatacaagctgtctgatagagaactttcaggcagatcccaccattagcctgtaaacaaaaggtgtggcaccagccacctgggaccaaataagaattgaattgtgcttgtccagatatgaacaaatatgtagtgagtatagagtttaccaataatcataacaaatattaaagatttccttggagtcagaggaaaaaacaaacaattataatgttgtctagggacgacatgatacgctacctcctttttcctgaagttttattccattatattgacaagatggagaaagcaagatcatgaaggtgtgcaaatgattcttacggcatggacaaggatttttcaatttattttttaaactgtttccataccctttctttttcttgctttttgtttttgccattgtgtttacgtttgagacacaaccagtcattggtggcaggggcatagagtggtcagtctgaaagggaggctctcttaagagctatgtgccttccaaccagagggagacccagtagaaagaaaaacatcctgggaaatccagctaccagggccctcccagtggaggcatcttacatttaggctacttcaagtatcctcagaaatgtattctgcacccccggccccgcccatgctgagggaaggggagcagttgccaatatttgcaccatcttcacatgcacatgttgcaacaagagcttctgggaaggtaagcggcatcggagctagatcacgtttcacaattagtggttattcttttctgtgtttgttttgcactttaaaaaagagagaacacatgcaaatgaacttgcttgtgtgtatttgatggctctaagggctataaattacaaacaaaacacatcccagacattaggagttcataagtatatttaatgaaattggtggttttaggaagtcaactttagttttgctttgtttgcatgtccactggtttttttattttgatatttgtctttttttaaattttacagtagtcattgaaagttatgtttctttgcttacttcattttttccctctaattatttaagattggaacaaaagtataaatattatttatttgaggtagaatttttttcatgtagtttcttaatatatacttgaaggaaatgtttcaccttatttttggtctttgtttattcatttagaccctgcaagttgattctcattgccagattccattaccctttcttcctcataggtagtaattaccaatgtaactaagcatttgtgttctgatatctgaggccagtaactattaatatctagttctcagagcatttggaaaggttatcttaaatggctacctaaattgaaatccttttcagaaaaaatataattgcaagtaggtaggagtggcctaaattgtctaatgtaataaagtcagacaaaatgcacactttatagtttcaagattttcagtaaataaaatctgtccattcctacctggacatgtcccattaaaaagtggaagattttaaataatttctttacagatgttttatttaaacaggtagcacaatctactaatgttgtgtgatttgtgttatactggttgtaattaatttttttaattcatgaactagcggaaaatttattaaattaactattaactacattcaccttgtaaattactgtataaaacttgttgacaatgcactgactttagaaagatgttaatgtacataaatagagtgtaaataaaatagtgttgatgtactgaaatatgaactgtatcaaaagtattggtaattgtatatggggtgtacctgtttatctgttaactattatccaaacaaattaaatactgtggttgcctctatgtgctgtttttcctcatacaagtaaacacagaaagtcaaaaaaaaaaaaaaaaaaaaaa

SEQ ID NO: 3022 - DNA, 2454 bp, Homo sapiens
ccaggaggcacgctggttttccggggccgctccatcgcgccttcctcctgcgcctcgcttctccggtccagccgccatcttcctttccgcacaggggccgccgagcggggccatgcagccaacgctgcttctcagcctcctgggagccgtggggctggcggctgtcaattccatgccagtggataacaggaaccacaatgaaggaatggtgactcgctgcatcattgaggtcctctcaaatgccttgtcgaagtccagcgctccacccatcacccctgagtgccgccaagtcctgaagacgagtagaaaagacgtcaaagacaaagagacaactgaaaatgaaaacacaaagtttgaagtaagattgttaagagacccagctgatgcctcggaagcccacgagtcctccagcaggggagaggcaggagccccaggggaggaggacatccaaggcccaacaaaggcagacacagagaaatgggcagagggaggcgggcacagccgagagcgagcggatgagccccagtggagcctctatccctccgacagccaagtctctgaagaagtgaagacacgccattctgagaagagccagagagaggatgaggaggaggaggagggagagaactatcaaaaaggggagcgaggggaagatagcagtgaagagaaacaccttgaagagccaggagagacacaaaacgcttttctcaatgaaagaaagcaggcttcagctataaaaaaagaggagttagtggccagatcggaaacacatgctgccgggcattctcaggagaagacacatagccgagagaagagtagccaggagagtggagaggaggcagggagccaggagaatcacccccaggagtctaaaggccaaccccgaagccaggaagaatctgaggaaggtgaggaagatgccacctctgaggtggacaaacgacgcacgaggcccagacaccaccacgggaggagcaggcccgacaggtcctctcaaggagggagtcttccctctgaggaaaagggacacccccaggaggaatctgaggagtcaaacgtcagcatggccagtttaggggaaaagagggaccaccattcaacccactacagggcttcagaggaagaacctgaatatggagaagaaataaagggttatccaggcgtccaggcccctgaggacctggagtgggagcgctataggggcagaggaagtgaagaatacagggctccaagacctcagagtgaggagagttgggatgaggaggacaagagaaactaccccagcttagagcttgataagatggcacatggatatggtgaagaaagtgaggaagagaggggccttgagccgggaaagggacgccatcacagaggcaggggaggggagccacgtgcctatttcatgtctgacaccagagaagagaaaaggttcttgggtgaaggacaccaccgtgtccaagaaaaccagatggacaaggcaaggaggcatccacaaggtgcgtggaaagagctggacagaaattatctcaactacggtgaggaaggagccccagggaagtggcagcagcagggagacctgcaggacactaaagaaaacagggaggaagctaggtttcaagataaacaatatagctcccatcacacagctgaaaagaggaagagattaggggaactgttcaacccatactacgaccctctccagtggaagagcagccattttgaaagaagagacaacatgaatgacaattttctcgagggtgaggaggaaaatgagctgaccttgaacgagaagaatttcttcccagaatacaactatgactggtgggagaaaaagcccttctctgaggatgtgaactgggggtatgagaagagaaacctcgccagggtccccaagctggacctgaaaaggcaatatgacagggtggcccaactggaccagctccttcactacaggaagaagtcagctgagtttccagacttctatgattctgaggagccggtgagcacccaccaggaggcagaaaatgaaaaggacagggctgaccagacagtcctgacagaggacgagaaaaaagaactcgaaaacttggctgcaatggatttggaactacagaagatagctgagaaattcagccaaaggggctgactgtcattggagcggtgggcactgttaagaagcagccatcacatgatctgtttttcaccacttcactgaaagacaccatttatatacccaagggcagaaagtagaacttactattcattaaatgtttgacacaattggaattgtctttaatttctgtcagaatgctattgaaaatgtgaattgcatgacttgtagcatattcttttctgcaaaatagacatattaacatgcttatgacaatgactgtgctactgtctttggaaaaatgtttgtctcagttggaaataataaaagattcacctgagacc

SEQ ID NO: 3023 - DNA, 5096 bp, Homo sapiens
ctcgggcaacggccgccgccgccacagccacacagccgccgccactgcgtccgtccccggtgagcgccgctgacgcgcggagatgaaattcccggcctcggtgctggcgtccgtgttcctgttcgtggccgagacaacggcggcgctcagcctgagcagcacctaccgctcgggcggggaccgcatgtggcaggcgctgacgttgcttttctcgctactgccttgcgcgctcgtgcagctcacgcttctcttcgtacaccgcgacctcagccgcgaccgcccgctcgtactgctgctgcacctgctgcaacttgggccccttttcaggtgttttgaagtcttctgcatctactttcagtcaggcaacaatgaagagccttatgtcagtatcaccaagaagaggcaaatgccaaaaaatggcctctcagaggagattgagaaggaggtgggccaggcagaaggcaaactaatcacccaccgatcagcgttcagccgggcgtcggtgatccaggctttcttgggctcagccccccagctgaccctacagctgtacataagtgtcatgcagcaggacgtcactgttggaagaagtctcctcatgaccatatccctgttgtccattgtgtatggagccttgcgctgcaacatcctagccatcaaaatcaagtacgatgagtatgaagtcaaagtgaagcctctggcctatgtctgtatcttcctgtggaggagctttgagattgccactcgagttgtagtcctggtcctctttacctccgtcctgaagacctgggtggtggttataatactcatcaacttcttcagtttcttcttgtacccctggatcctcttctggtgcagtggttccccattccctgagaacatagagaaggccctcagtagagtgggcaccaccattgtactatgctttctaactttactctatactggtatcaacatgttctgctggtctgctgtacagctgaaaattgacagccctgacctcatcagcaagtcccataattggtaccagctactggtgtattacatgataagattcatcgagaatgccatcctcctcctcctgtggtatcttttcaagactgacatctatatgtatgtgtgcgcacctctgttggtcctgcagctgctcattgggtactgcacagccattctcttcatgcttgtattctatcagttcttccacccttgcaaaaagctcttttcttccagtgtttctgaaggctttcagaggtggctcaggtgtttttgctgggcctgcaggcagcaaaaaccctgtgagccgataggaaaggaagatctacagtcatccagagatagagatgagacaccttctagcagtaaaacaagtcctgagcctggtcagttcttgaatgctgaagatctctgctctgcttaatgggacccaaggtctcagagcacaggcatattattttctgggtttgatactcgttattcatacaaataatgagccctacacagggaacaaggcaggaagttagctgttaactccttgtgagctgcttctctttatagagctcttgggtatgtagaactgtatgggaagaagccaggaaaacctctgagtgttgaaggggcaacccaaggcatcacagttcacaggtaaccatgttgtgttcttctaggcattactggccttttcactgacaagttacccctgaaatctgagttgtactggttagattcattaggttgaatgaggagaggggcttacctgttctctagttttccagactgctggtttgggtaacctgaagttttatgatccctgaacatagttttcacccaagagctgtcctggtgaccaaaaaagattactagggttttgccatcagcaacatcattcctgtcagagctttcagggagggctgttcaagtttggtttttgaatagacagaggtttcattttcatctcattagggcttttttgtacatagccaactgtagccaccctggcatgctgtctctaattgattcaagggcctagatttggagactttgttccttagcatccatggatgcagaaatgagtgataaatttggccatgaaagccctggaattttaggaaagttgtgattctttgatatgttgatgaaattctggatcaggaggggtgttaaaacatcaaaatgatggcgacttgtataagtagaattcttaccatcttactcctgcctccccattccttgcctgtcaggaccattttagaagagttaccttggttaacttaagggttttttagaaaaccccacagaaatctctcacccagttcaggtgtatagggaattttcattttcattatttcaaggaatagagttttcctcactaccacttgtaattagagattgacttcagaaactttttctaaattataaagacggaatgaccagaaaatttttgtctttcatggaatgcaatttgacttggcataattgtgagttaatttgataaagatctccagttgtatcctctgacaccctttaatgttctatataatttttcctttaatcggagaccctatttgtttcattaaagaggattgggtagcatatcctcaattatcttggaaaaatgcgtagatctagtgccattatttctaccattaaaatcttgaaagcgaaatacttgaaaagaggtgaccataaagatcacaccaatttagaatgaatattaaagtctgagaaatttacaaaagggactctatggactcgattttaccatatggaatagggatccacttctctgttaacctacaaaacgtatttatctggccattgcacttcggataattttcatttttaattcctcttggtgtcaaatttttaagtaatttcatgcacacaggagaaaatgcaatttgataatcagtttccactacattcggaggtcaagaaagcagtatatattctttcacaaggcatccatactgtttaatatttatagagttcatagaaatacatcaataagctcctaaattatagagcctcaattttggtttttctcatttgaaatgtttttgatttatcaatatttgtggtttaactttgtgggggtgtccaggcagtagatcattttttgtctatttttaaccaaataagaataacactcaagactatgttctccatcccaacacatcacttaccacttgcactattcttaataggcctaaaatagtgagcatatataatcaaaataatacttcatacaacatatacttccatgcactcttcatgtaatcacatatgtgcatagatacacaatcgtattacataaaacacccttgaaaatatatgactttgaataaaataaagctaccatgttaatacatcattttttgtttcttcctaattaacaaaagggctctataatgattaggagagctgtaaggccattctttagtcattccaagtgtatatttgtatcacaccagttacttgtgttcattgacaccaaatattttcaagctttttgtgagaaagagattcttgccttgaggctctgcagtggcaaatggtaggggcaatagcgctcccttttcacctgaaatgccttcagctcaggccttgggagtgaggtgtgggagtagccaccagcctcccactgactaggcatgttaggaattagacaaggatggagagactggttttttccagccttggtttggaagcttgtctcaaaaaccattacaaaatcttaaccttcaaatacattctaaatcactttaatttagaagataggtgagcaacttgagtgatcccaaaccaaactaacagtgctggtttgtccgacacccaaagcccacttcacacatttataaggacagagatttggtaactcatttgggtattttgtcagttttaacccttaatatacaggtatcccagctttgggcacatgtatgtccattcactttcaggaaggggtgtcagtactttctttctgtgtggtgaaaacataagccatggtgaactgataatttttgtttttaaattatttatattactgaattggcaaaattacagttcacactgcagagctaggttgtcctattggcataaaacaaaccagcaacttttctcatgtgtttggagtttggagttaaaatgtgtttttcagttataatttcaatttttaaatttcttggtgctttgtctaattaattacatcccataacttgtcaggatagttgctccaactgaattgctatcatttggctggatgggggtgaagtatgtcttcaaaatatattgaagtaagttcatcaaacatgtttagacttcctctcattgctggagacagcccagtgtagagattggcacttccctgtccagcactacaacttaattgctctatgcctcagtttccccataatacccttttccaacctacctcacaaggttatcagaaagatcaaattaaataatagatgtgaaaatgctttgaaaatgtttttaagtgctatgcatatttatagagttattatagttattcaaatccataagcaggttatttttatttttttactgtttgaaaagaaataagtagtgtcattcatatgagttcctgagtggatatgcgaatctttggtcttctcgacaggtgccctttctcttaccactagttgcttacaaaaatagcacccaaacacatggcacttggaagaaaaagacccactgaatctgagaaagtactttctggtggcaaatgaatttatcattttagtatagttttcgataaaggatatagcaacatcttttgataattgtgctttacaacttgaatgctgattcaaggcattatttggatgtgagtttaatcttttcagccttgtaaatgggaaaatatatattaaaattgattgtcaaatacagcatttctttggaaaccaccttaaaacattagtgctatggttatgagtgtatgtgccagtacttaccagtcaatgcattgtggatatgagctttcgttgactgcttctctgcagtcgttgatgctaataaatattgtcctgtttcttcatataataaattaatttttcaatttctccttgtaaaaa

SEQ ID NO: 3024 - DNA, 420 bp, Homo sapiens
gggggctggccgagcgccgtgcgcgcttgggagaaggccggaagcttaccagccgagaaggaattcctagctagcttcagagccggtgcctccggagccagcgtggtggccatagacaacaagttcgaacaggccatggatctggtgaagaatcatctgatgtatgctgtgagagaggaggtggagatcctgaaggagcagatccgagagctggtggagaagaactcccagctagagcgtgagaacaccctgttgaagaccctggcaagcccagagcagctggagaagttccagtcctgtctgagccctgaagagccagctcccgaatccccacaagtgcccgaggcccctggtggttctgcggtgtaagtcgctctgtcctcagggtgggcagagccactaaacttgttttacctaggg

SEQ ID NO: 3025 - DNA, 2532 bp, Homo sapiens; identical to SEQ ID NO: 296

SEQ ID NO: 3026 - DNA, 2288 bp, Homo sapiens
ccgccgcccgccacactcgccccccgccccccccgcgcctcactcgcactcacacccgggcgcaggaggcgggcggcccgggccccaccggccccccatggacgcccccagcacggggcgctgagacccccgcgtcgctgcccagcccggtccggcgcgccacgccgagggatctctggacaggacaagactccgaagctactcccccagcacacagcccgggacccacaaacccagcttgcccccagccctcccacctgccactccctggcccctcccaccgcccgccccccttggggcgcagggcatggtgtgaaaggccaagtgctgaggcgggtatcatgggtgctgtgccctagggcctgggtggcagggggtgggtggcctgtgggtgtgccgggggggccagtgtgcccaccacagtctcttggcgtgctggagggcatcctggatggaattgaagtgaatggaacagaagccaagcaaggtggaatgtgggtcagacccagaggagaacagtgccaggtcaccagatggaaagcgaaaaagaaagaacggccaatgttccctgaaaaccagcatgtcagggtatatccctagttacctggacaaagacgagcagtgtgtcgtgtgtggggacaaggcaactggttatcactaccgctgtatcacttgtgagggctgcaagggcttctttcgccgcacaatccagaagaacctccatcccacctattcctgcaaatatgacagctgctgtgtcattgacaagatcacccgcaatcagtgccagctgtgccgcttcaagaagtgcatcgccgtgggcatggccatggacttggttctagatgactcgaagcgggtggccaagcgtaagctgattgagcagaaccgggagcggcggcggaaggaggagatgatccgatcactgcagcagcgaccagagcccactcctgaagagtgggatctgatccacattgccacagaggcccatcgcagcaccaatgcccagggcagccattggaaacagaggcggaaattcctgcccgatgacattggccagtcacccattgtctccatgccggacggagacaaggtggacctggaagccttcagcgagtttaccaagatcatcaccccggccatcacccgtgtggtggactttgccaaaaaactgcccatgttctccgagctgccttgcgaagaccagatcatcctcctgaaggggtgctgcatggagatcatgtccctgcgggcggctgtccgctacgaccctgagagcgacaccctgacgctgagtggggagatggctgtcaagcgggagcagctcaagaatggcggcctgggcgtagtctccgacgccatctttgaactgggcaagtcactctctgcctttaacctagatgacacggaagtggctctgctgcaggctgtgctgctaatgtcaacagaccgctcgggcctgctgtgtgtggacaagatcgagaagagtcaggaggcgtacctgctggcgttcgagcactacgtcaaccaccgcaaacacaacattccgcacttctggcccaagctgctgatgaaggtgactgacctccgcatgatcggggcctgccacgccagccgcttcctccacatgaaagtcgagtgccccaccgaactcttccccccactcttcctcgaggtctttgaggatcaggaagtctaaagcctcaggcggccagagggtgtgcggagctggtggggaggagcctggagagaaggggcagagctgggggctgagggagacccccccacaccccttctctccttcctctcgtccttggatagattcagctcccacacacacacccgcactgcccaggtccctcctcagacctccagccctgggacaggcaaacaactgaacttgctatggaaaggacagtgtgggaggctgggggagctgtgttctgcagttcccaggaccccatcctctcagaaggtaggggaagggcgggaggattgagaagggacaagccaccttgaccgtagggaaggaggaatgtgggctgggggaagatgccctcaactcaccccctacacacacatgagagagagcccccacccagttccttggcctaggtctcccctccaggctgagggcctctctacttccccagatgcctgggtgcaaagaacggcttggcttggctcctcctctggagttaaaatttatagtcattctaactgcactttggaaaccaagcaaggggagaagacaaatgaagaaaaactagacagagaaaaaaaaaaaa

SEQ ID NO: 3027 - DNA, 2244 bp, Homo sapiens
gcacgggacaggccgggccacacccaccggggcgagctcggagggcggcgctctgggcggagggcccggcggctcggcccagggcgcgttacctcgtcgccggggccggagagggcgggcggaggcacggggcctggaggcgccaggcggaggatgcgggcgacacggtggcggcggcgaccgcgcgaccgggcgggcgggcgggcaggggcgagcggagggagggagcggactgcggcaggatctgtcgaggaaaaatcttgcggccggcgattccccgccttttaagcgcagcctgcactccccccaccccacgcaggggcgggccttccccaacgcgggcgcccactggccgccgcgcgccgctcccctccagctcgcctgcgcctctcactctccgtcagccgcattgcccgctcggcgtccggcccccgacccgcgctcgtccgcccgcccgcccgcccgcccgcgccatgaacgccaaggtcgtggtcgtgctggtcctcgtgctgaccgcgctctgcctcagcgacgggaagcccgtcagcctgagctacagatgcccatgccgattcttcgaaagccatgttgccagagccaacgtcaagcatctcaaaattctcaacactccaaactgtgcccttcagattgtagcccggctgaagaacaacaacagacaagtgtgcattgacccgaagctaaagtggattcaggagtacctggagaaagctttaaacaagtaagcacaacagccaaaaaggactttccgctagacccactcgaggaaaactaaaaccttgtgagagatgaaagggcaaagacgtgggggagggggccttaaccatgaggaccaggtgtgtgtgtggggtgggcacattgatctgggatcgggcctgaggtttgccagcatttagaccctgcatttatagcatacggtatgatattgcagcttatattcatccatgccctgtacctgtgcacgttggaatttttattactggggtttttctaagaaagaaattgtattatcaacagcattttcaagcagttagttccttcatgatcatcacaatcatcatcattctcattctcattttttaaatcaacgagtacttcaagatctgaatttggcttgtttggagcatctcctctgctcccctggggagtctgggcacagtcaggtggtggcttaacagggagctggaaaaagtgtcctttcttcagacactgaggctcccgcagcagcgcccctcccaagaggaaggcctctgtggcactcagataccgactggggctgggcgccgccactgccttcacctcctctttcaacctcagtgattggctctgtgggctccatgtagaagccactattactgggactgtgctcagagacccctctcccagctattcctactctctccccgactccgagagcatgcattaatcttgcttctgcttctcatttctgtagcctgatcagcgccgcaccagccgggaagagggtgattgctggggctcgtgccctgcatccctctcctcccagggcctgccccacagctcgggccctctgtgagatccgtctttggcctcctccagaatggagctggccctctcctggggatgtgtaatggtccccctgcttacccgcaaaagacaagtctttacagaatcaaatgcaattttaaatctgagagctcgctttgagtgactgggttttgtgattgcctctgaagcctatgtatgccatggaggcactaacaaactctgaggtttccgaaatcagaagcgaaaaaatcagtgaataaaccatcatcttgccactaccccctcctgaagccacagcagggtttcaggttccaatcagaactgttggcaaggtgacatttccatgcataaatgcgatccacagaaggtcctggtggtatttgtaactttttgcaaggcatttttttatatatatttttgtgcacatttttttttacgtttctttagaaaacaaatgtatttcaaaatatatttatagtcgaacaattcatatatttgaagtggagccatatgaatgtcagtagtttatacttctctattatctcaaactactggcaatttgtaaagaaatatatatgatatataaatgtgattgcagcttttcaatgttagccacagtgtattttttcacttgtactaaaattgtatcaaatgtgacattatatgcactagcaataaaatgctaattgtttcatggta

SEQ ID NO: 3028 - DNA, 118 bp, Homo sapiens
gaaaggtacatatattcgtttatgtctaaaataacaaccagaatcttctttatatatagtatttttaaaagacacatatacacaaacacaaacatgtgcagtaaactcaaacacacaa

SEQ ID NO: 3029 - DNA, 427 bp, Homo sapiens
  misc_feature (1)..(427): n=a,t,g or c
atctaacaaaggcactttattgcattaccattcacaattaacagtcaagaacaaataataataacaaataaaataacttttaagaggacaaggcattagaaataaaaaaggacactaataacatttgtaaaagcttgtactggatgtggttgcccccatttgtgtgtgtggttgtgtgtgtgtggttgtgtgttggtggccacagctgagcctctgtcaccagagaaggctgaggcccaatggcacacctcagaaacctacaccccgaggctnggacggctggactcctgagcacaagctccctctcgcaccctttgccagacagtttgtctccaatttcaaactgacctaaggctcttactcctggattttttgtttttaaaccttctcccagccagtcttcgggagggcatgattagagaagngg

SEQ ID NO: 3030 - DNA, 412 bp, Homo sapiens
  misc_feature (1)..(412): n=a,t,g or c
tttnnttttttttttttttgtgtgtttttttcttttaatgccaagcacaaagtgtacatcataaaattcatatttggngtttggcattattttantaggtatgatcaagaccacaaatatcttgccataaaaatattctactataataatgaaaaaatatatcattacatcatcagtgactcgaataaaatatggtatagatatggcattttcaatgaaagttggaagacacaccacatttgtactagtcttaatataggcacagtaagaagaacagatatttcccnctttggctagtgatatgcntttagggtagttacgctgctgattatcccagtgaagttagtgttgaggaaattctctttacttgngccaaatctgcacttatgggcaagactgtggtacaagcncc

SEQ ID NO: 3031 - DNA, 462 bp, Homo sapiens
  misc_feature (1)..(462): n=a,t,g or c
tgacagaccaggcttggcagtttatttcggtttcacaacccccttccagcccttggggtcccttgagcagcacatctgggtgccctggccttcagcgggnagngngtcctggggtcccagcgcangangngggagttcccctttaggagtctcactttcggctgggcatttctgggcttcctggggggcagatctggccgtgggggcaatggaggagccnaaaggggcacctgcccaggctccaactccctgccttcctggtcactgctgttccctgagtcctcagcagtagcctgaccgtagaactggtagatactcacggcctcccagcccttgatctcgcagcggcagaaggggcaggtctgggctgtccgagtgctgccaggcanccaggcagcagctgcagaanaggtgcccgcacggctcaatcttcacatccttgttgctctcagcacagatctt

SEQ ID NO: 3032 - DNA, 261 bp, Homo sapiens; identical to SEQ ID NO: 860

SEQ ID NO: 3033 - DNA, 562 bp, Homo sapiens; identical to SEQ ID NO: 2669
  misc_feature (1)..(562): n=a,t,g or c

SEQ ID NO: 3034 - DNA, 429 bp, Homo sapiens
tggagataaaaacagcgaagtcccacataccataccctacaagacacaaggtgcgcagacgagccttggtaatgtaccggcgctgcaggaagaggctgtccgccgagcctgggctgctccagctacgcggggaggcggccccattgcaaagtgcagtttctccgcggaggtggcggtgggtcagtggcagagggccatggtttccatgttaaggaagcggacgtgcatcttggtctcaatgtcgatcccctgccagatcttcaggaagtcctcgaaggtgatcccctcgtacacctgatcaggctccatcttgccccatgcacacgctggccgcctccatcatggccccgtcggcgatggagcgagcggactccttctcgatgtgagggtttcccgacagcagctcctcgaccactttacatttcgagg

SEQ ID NO: 3035 - DNA, 348 bp, Homo sapiens
  misc_feature (1)..(348): n=a,t,g or c
acataatccctagtatagtcagatatatttatcacatagagcaactaggttnaaatatagttcagtgacatttctagagaaactttttctactcccataggctcttcaaagcatggaacttttatacaacagaaatgttgacagaaattgctgtagtttagggttgaagtactgtatgatgggcagcaatcatgtattaacttacgaaggggaaattgaaatatagggaccgaatttggttttatcagtttccagagtactgctgccaacctagacactgatttttcagagtttgaaatgtaaatttcttcccgggactttgattgcacatgaagctggactgcgtta

SEQ ID NO: 3036 - DNA, 652 bp, Homo sapiens
  misc_feature (1)..(652): n=a,t,g or c
tgactttgctgatggtttattaccttaaggaaaagacttacacagagaaattgagcaatgaaaacccttcacattgagcaaacacattccacgctacacaaatcatgagaaaaatgagaactgttgtgaaacatgacagattgcccaagtgttatttttcctctattggaaaattctaagacgtttcctcatgtgtagtttttcagtcacaaaaatggcagtaggaatatttaaatattaaatcacagtttgaaaatagatacatacatacatatatatacacacacagagatacatagttgacttatgattcccagatatgcagggttatcattgtgactgcttggatcaagacaagtttgtaaaaagcagcgacatagttcaacataatagtcaggagctagattacttccctgtaattgctatgcacacacagtacaaggctagcgagattatagacaatctgtcttcgaatctactatcttgataattctgaatcttttcaagttaaaattgcagctattgtcagtaagcgcccctataaaggtcaggcctttgantgggggacgataactngcgtcaccaggagagaggcncggttcaacttccnggttccgtctggcngcggtcacagccggnaacctgggtcccg

SEQ ID NO: 3037 - DNA, 614 bp, Homo sapiens
  misc_feature (1)..(614): n=a,t,g or c
nggctgtgataggtttattcagaggaagcactagactctggggtagctcacatgggtaagaaagacttccaggagcaggcattgaagggttggcaccctgggtgagtgtccaaggtcagcgagagtcacttgtggaggggacggaagatgacctggctgatctggccagggatggtgtagaagaccaggaggaggaagacggtgagcagcaccagtagcagcagcaccagggtngcccagtaccggcncagatgaagaagacaaaggccttcagcgggttcacaaaccagttgaaggaagttttggggcggctgggtttctccagaaggctcttggctgcttccgccccttccccattggccgtttctcgggcttccttccacagtcaagcaagctcaaactcttgcctccaacnttgcccgtgaagaatgtacacattggcanccatgtctgtgaactcccangtctttttggccggccttcctcctcctctgctttcgcttcttcttgcaagcctgagcctcctgngcttccggtcaagtccttgctccttaagttnaataacggcaacagccctcaaggggggaagaaacagattgactcngccggcccat

SEQ ID NO: 3038 - DNA, 187 bp, Homo sapiens
tttttgagacatgaaaacgtatgcatttttattaaccagatttttaaaaaaggacaaaggcacatgtatcagggtgccgggggtgcatggtgtacatctgatttcataagcaatgtcagtctcctctaaactggcatcctgcgcttgacaggtaggcagaacaaacgggacgctggcaccggaacct

SEQ ID NO: 3039 - DNA, 349 bp, Homo sapiens
tttctcggtcaataatttattagtaaaatatacatttctcattattaaagaataaaagctttcagccctgctgaacacacatctgaggtctcaagaaaaccagacaagatagctgactctcccacatagccctttccataaaggcgattcctaagcttaaacacacacaaagctggggctgtccctcttgaatcccatgggaaacaggccccaagatcaggggacctggagtcgggagcttggggtgcagtctgctcactgacaccctctcgaagagcacgcaggggaacctggtcctgggatggagtctttctggggatgcccacgtctgtgctgcctggaaccgggt

SEQ ID NO: 3040 - DNA, 476 bp, Homo sapiens; identical to SEQ ID NO: 358

SEQ ID NO: 3041 - DNA, 388 bp, Homo sapiens; identical to SEQ ID NO: 2117

SEQ ID NO: 3042 - DNA, 461 bp, Homo sapiens
tgcggccgcctccatgaagcggaaaagcgagccgcggtcgagctgggccgccgccccccctgctcgcgggctgctcgtcgacctcgccgggtgtgaagaagatccgcagctccacgcagcaagacccgcgccgccggaccccccaggacgacgtgtacctggacatcaccgatcgcctttgttttgccattctctacagcagaccaaagagtgcatcaaatgtacattatttcagcatagataatgaacttgaatatgagaacttctacgcagattttggaccactcaatctggcaatggtttacagatattgttgcaagatcaataagaaattaaagtccattacaatgttaaggaagaaaattgttcattttactggctctgatcagagaaaacaagcaaatgctgccttccttgttggatgctacatggttatatatttggggagaaccccgaagaag

SEQ ID NO: 3043 - DNA, 339 bp, Homo sapiens; identical to SEQ ID NO: 2512

SEQ ID NO: 3044 - DNA, 402 bp, Homo sapiens
ggcaagaaaaaagagtaatgtacaaaagtcattacattttgtaatatactcattacaaaaagagtaatgcacatgagtacattactgttgtattaaaaattatattagaagaaatgtctctttttgtgaacaacttcacaaaaccagaaaattataaagccacattaaaattaggtgaaatcacatcagccagccagacacaccattgacatttttctatattttctgacaggtttttgaaaatgcatatatactttaaaaacacagttgggtcaggtgcagtggctcacgcctgtaattccagcacgtgggaaactgaggcagaaagattgcttgagcttaggaatttgagacaggcctgagcaatatagcgaggctctgtctctaaactaataataatcc

SEQ ID NO: 3045 - DNA, 399 bp, Homo sapiens
tttttttttttttacctcttcaggatttattgggtcagggaagggcctggccagagaatctgtcctgaggtgtccctggtactgcactcctgagtttctccctgagttgtctgccgctccttgttcagccataccaccatggggtgactctgtcaagcacctgggggtcctgggtgcccagcttgccaagtgatcttgggcctattccttgccctccctgagcctcagtctctcatcctccatgggaggatggtaattttcctgaaaaagacagggccgggccacccagggtccacttccactcagcatcttggattccagggaagcagacagcgttcaggtcctgcccttctgtgactccctgcagccactgcttcttgaagcctttgtctctaagct

SEQ ID NO: 3046 - DNA, 478 bp, Homo sapiens
cttgaattattgcatcaaggactttccccctacttcgattcattgctaatgagctctttgcttcttcaactttttgaaagagatcatgaaccaaacttttaaagtttgtttcttcttgtgtaagtttttgaagttctttttctttctcctttaattcttgttcagtttgagggagttttccttctatatctctgattgcagctttcctttctttgagagtctcagaagctgcaattagagcttccttagccttagttaattgagacactgcagtattatgacgactgagatagatatcaagttctgactgggctacatccatctttgaacgtgcttcatttaccgatttgctgaaacccataagttctttctctcgactctgttaaaatatgagttcattaaatctggacagatatttactttcaaacctacactgaaatgaaaccatacattttatattcgatttaagaaaggagat

SEQ ID NO: 3047 - DNA, 330 bp, Homo sapiens
gggtgtggaaacatgtgagtgtattatttatttttgaataaataatacaataaaatataaaacatacacttattgtggccctctgcacaagcaatctggttgtgcagagtcttggtgtcccctgctagtcttagtacctgtatagagctcttcagactgggtgtcgtgttgcagaggctagcaccattcctgatgtcaccctgggtgagacgtggtcctcagaatccagatttccttttttgtctttttccttcttccacatgttctaagaaaacatagatttctggccaggcatggtggctcacgcctgtaatcccagtactttgggag

SEQ ID NO: 3048 - DNA, 183 bp, Homo sapiens
aaaaactaaaccgcctggggctgatcgtcccagagcccggcagttaggaccatgcgggaagtgtcctggggcatatagtcatactgatgaggtgaaagatacacctcggaaccaagggccaccctctacttttaaggacaatggcgccgggaccaagaaactacacttcccagaaaaccgtgc

SEQ ID NO: 3049 - DNA, 142 bp, Homo sapiens; identical to SEQ ID NO: 373

SEQ ID NO: 3050 - DNA, 371 bp, Homo sapiens
ttttttttttcagtgttttaaacaaatgtagactttattttgtactgtacaaagtgctaatgtcagtagatccattaaaatatagaatatttaagaaagatcattaataaaagtaatggtcattcaatttaatgttacagtttacagcgttttactgctagtgttttaagtcagcatgagcagtatcaaagtacttatgtagctagtttctaaaactttacagaaaacccagtacaattccaagtgcttatagccaatataagcatatttcatattagaaatagttatccatatgttaacaagaaactatggtcctcaaatatgccaattttagagtctaataactactgatagtaactatgtaaatattt

SEQ ID NO: 3051 - DNA, 427 bp, Homo sapiens
attagcaaaattactttattctaacaaatagtttaacacaaaaatacgaactagccctccagggatctttggggtctacgcttcccatcgcctcagtgtccggtgcatgaggaaggtgtcctctgaagggcggggccggagttgaagtcggagagggggcagaccgtccagggtcaggtgtggagattcataaaatagcgtttctgggtcacacaagatggtcatgtctggcccaggcccaggtggctcctgttgggaggttgggcccaaagcaaggttacactttgggaggaaggatccgggtaagggggtacatggaggaagccccacgcccagaccccatcacctttgggtgcggggctcgagcatgtgcggcaaggagagccaatttctccctgagcgcggcattcagaacctgttcctccgg

SEQ ID NO: 3052 - DNA, 335 bp, Homo sapiens
tttgtaacagaaaaaaatatatatatttcaaaggtaactagttttgttttactcaaactatttacaacaaggggcagagtagagacatgaatagctgcacaagttattttaattataaattaataaaagcctacattaaattcatcttattaactacttatgagagtgtataaaaactgatgaagccaacattatttggtacttctgatacttccattcgcttcaacttttctttcttaatagaaaaattaacagatggcaagccatttacaaaaagacatgtaattttgttaatcaggttgacattttgaacatcttcctcttcagttcagctg

SEQ ID NO: 3053 - DNA, 425 bp, Homo sapiens
tttttaaatacatgccaaagcgtttatttaactcattaattaatgagggaattggtagatattacaatgaattcaaaagcaaattgggagtgtcacacatttttagtcaaatatggaatgctgaaatgaatttacaaaaggatacaaaggtggtcactatctgctggaaaaaaaatcagtttcattccattagatccaatttgcatttccatggataataattatttgtattcctatcagttttctataacttcatttctatcgtatggggttgtaaaataacctagtcaaagatacggagagagctgggcacagtgatgtcctcctgtagccccagctactcaggaggctaaagcaggaaaactgcttgagcccaggagttcaagaccagcccaggcaaaagagcaagactgccatcttaaaag

SEQ ID NO: 3054 - DNA, 255 bp, Homo sapiens
ttttttcttaagacacatttattatctcacagtttctgtagaccaggagtctacgcacagtttatctgttttctttgctcagggtctcacaaaactgctatcaaggtttaagtcaggctgtcttctcatctggaggccacctctcaggttgttggcagaattcatttccttgtggttgtgtgactgagggccctggcttcttactggttgtcagctgcaggctgcgctcaagttctagaagccgtctgcagttcc

SEQ ID NO: 3055 - DNA, 446 bp, Homo sapiens
ggcagacacttccatttaatgactaaaaatcacacatctcaggtcacgggtctaggagaaaacacacacacacacacacacacacacacacacacacacggattccccatcaaggggacatttgcagtttccaaaccttgaagatactgaagggaccagaaagttcctttgagtggctggtcacccaaagctcccggtcctccacccactgccctttggagggactcaaaccttgggaggagaaggctgagcttcctgtgggcccctcccacccacacctgagccagagagaagactgcagcaaagacatccaaagccaacgcaatgggaagcgtccgagatggcagaggagccagccctgtccttggctcacccagcttccaccatacaggaacccaagaccccagccttgcttccacagagaactggcaggggtcccctggcct

SEQ ID NO: 3056 - DNA, 448 bp, Homo sapiens; identical to SEQ ID NO: 391

SEQ ID NO: 3057 - DNA, 403 bp, Homo sapiens
ttttggaaggataatctttttattttcttaaaaccactttgggagtgcatttgtattcaagaggcaatagagaacctcaacaaggctggggagttgggataggcaggaatctggaaggcaggataactcttgagaacctggagagcgtctgtggtttacggtcagtctcaaggcgatggatgggagtcctggtgtgtttagatttggcatgtttctcgccttctagggaggtgccgttaagtcagtgcccagagcccaatcccatggcacctgctcaggaccatgaatgaagaccttgctctggggcatccaggtctgtgtgaaggagcaacaggagcctgtgggcaggcagatgtcttgggaggggagatgtttggagccaagtctagagaagcttctcact

SEQ ID NO: 3058 - DNA, 297 bp, Homo sapiens
tttttatattctccctttattaaataagaggtagcatactctattaactattctacaccttgtttttttcacttaacaatatatcctaaagatcattttatgaaagtatacaaatttcctacccctgttggagctgcttagtattccacggggtgaatgcactgtagtaggttcaaccactcctgagttggtggacatctgagtcgtttccagtctttaactattataggcaatgcttcggtgaacatgtcttttcatgtttgtgccattgtatctttagttttgtatcagttagct

SEQ ID NO: 3059 - DNA, 448 bp, Homo sapiens
ttttttttttttctgggttttcacaagtagcatttttattcctcctgctgtctgacatctgagctccaagctctaaacccaacctgtattatatgcagcagcaggttatctttgttttaaatcacatttgttattctgtacttagtcacctttccgtgtgatctgcatttgaaatgttgtaaacttggtcagtatttccattaaaatatcagggctaatcttgtgtatttttttttgttcctaatgattttatagacaaagactcttggcaaccccaggagaaaaaaaataaagctgtcagtggagtactagggatgagaatgaaactggaggtctgtttctggtattatggcttcccgggactctacagtcctgtatggtgaaatacatttttccattgggatcgtcaatgccatgactgttctgccacctcaaactccagagtttc

SEQ ID NO: 3060 - DNA, 436 bp, Homo sapiens
ttttgggaagagtgattaagaaactttattacagaaaatgaatgcatccaacgtccccaaatacatttgtgacaagaacagacacacacaggagacacagacaatagtcactacatcacagccttgttctttccgaagataaaatgtcattcaagaatggggtgaggtggttagagggagtaggtactatccttttaaatgggggaaaaaaaaaaaaaagcaacaggttggcatcttaagaacacagacagtgggcccagaaatcaagctaagcctaagccttaggtaacatcatgccacttacatcatctcagagaaactagggcattattccactagaagagcaatcttgccacagtgtgaaaacgttgagtagtgatcttgctgccccagctaatggaccaagtggcctcaacttgacagcctctttaaaact

SEQ ID NO: 3061 - DNA, 303 bp, Homo sapiens
tttcaatttcttcaacaggtcatgttcaatttcttcaaagttttaacataaaaataatgagagccaggagtggggccggggctggggggacgaaggtggtatgtgaacaaggttggcacacaggcctcaccctcctctgcctcagattcccaagtgggcaggtgggggtgaatggggctccgggtagcacctcagctcctctcagctcccctcagcctgttctccttccagacccagagagctgagaagagtagctgtgaggctcagggcagaggctctctgcctttcaggaacagccctaac

SEQ ID NO: 3062 - DNA, 297 bp, Homo sapiens
gcactttttggaggaagtttattaaattaaaaaaaaaaactacaaatgagtaattataaaatataatttcactcttttcattatttaccacaaaaatttaaaaataccaatatacagacgagcacaagtgaactggaaaagagctaaaaattgtataaaagacaaatctaaactcaagaatatatgagaagtgacatacaccatacactctcaagtgagttcagaaagcatgttccgtgctgggcaggttttctttccaggtcagtttttattggcactacacctggaaagctctct

SEQ ID NO: 3063 - DNA, 401 bp, Homo sapiens
cttttttggccttctgctttgaccaagctttattttttatgaattttcttctcccttcattttctgttttctctcttctttgttgctccaggagtttctgcctctgcttttctctgattttatctttaaatggaatcgtgtcggtattaacgtccacgggcacaaaatctggaaactgctttcctctcaattctggcatcttgggcatcctcagcagggcaaaacctcgagcaaggctggcaaaatcaagatcctttaatctgaaaatcaggttgcattcatgctttgcataagcttggacatatgacacaaaagctttcatgcccttttcaaacacagctctgtcagccagggccatggacttgagttttggcagaaggtccgctgtgtttctctggggc

SEQ ID NO: 3064 - DNA, 379 bp, Homo sapiens; identical to SEQ ID NO: 2528

SEQ ID NO: 3065 - DNA, 413 bp, Homo sapiens
  misc_feature (1)..(413): n=a,t,g or c
aataaaacacatttgtttcatatttgctgaaaagtaaaacaataatattgtacgaaatgttatacacagggtaggttgtacatagcagtttcagaaacatcattgcatccaccagagaaactattctaaaactgatattcacacattttttataataataataatatgttagaaacatacagtgtggcatttagtatatacactcccttgctcgcaagcgaaaaatcctaatcgcttctgtataacatgctttattttaaagcctaacctttaaaaacactgttgtgatattactaacaactgcttttataaaattaatttgacatttcgatatatatacatcctttcagtcatttaaaatgttaacaatgctaaacttaaaaaataacaagcttatagntaatggttaaaat

SEQ ID NO: 3066 - DNA, 447 bp, Homo sapiens
ttgagacagagtctcactctgtcgcccaggctggagtacagtggcgcgatctcggctcactgcaagctctgcctcccgggttcatgccattctcctgcctcagcctcctgagtagctgggaccacaggcacctgccaccatgcccggctaatttttttgtgtgtatttttagtagagatggggtttcaccgtgttagccaggatggtctcggtcgggatagagacggggtttcaccatgttagccaggacggtctcaatctcctgacctcgtgatccacccaccttggcctcccaaagtgctgggatttcaggtgtgagccaccgtgctcggccaaggacatcttcctaatgtacttgatgtgagacagagaaatgggaagtcctagagacttataaatctgcaaccacaaaattaagaaaggaccctgaagttacctgggtcacgc

SEQ ID NO: 3067 - DNA, 1253 bp, Homo sapiens
cggccgggagagtagcagtgccttggaccccagctctcctccccctttctctctaaggatggcccagaaggagaactcctacccctggccctacggccgacagacggctccatctggcctgagcaccctgccccagcgagtcctccggaaagagcctgtcaccccatctgcacttgtcctcatgagccgctccaatgtccagcccacagctgcccctggccagaaggtgatggagaatagcagtgggacacccgacatcttaacgcggcacttcacaattgatgactttgagattgggcgtcctctgggcaaaggcaagtttggaaacgtgtacttggctcgggagaagaaaagccatttcatcgtggcgctcaaggtcctcttcaagtcccagatagagaaggagggcgtggagcatcagctgcgcagagagatcgaaatccaggcccacttgcaccatcccaacatcctgcgtctctacaactatttttatgaccggagaaggatctacttgattctagagtatgccccccgcgggatgctctacaaggagctgcacaagacctgcacatttgacgagcagcgaacagccacggtccggcggatcatggaggagttggcagatgctctaatgtactgccatgggaagaaggtgattcacagagacataaagccagaaaatctgctcttagggctcaagggagagctgaagattgctgacttcggctggtctgtgcatgcgccctccctgaggaggaagacaatgtgtggcaccctggactacctgcccccagagatgattgaggggcgcatgcacaatgagaaggtggatctgtggtgcattggagtgctttgctatgagctgctggtggggaacccaccctttgagagtgcatcacacaacgagacctatcgccgcatcgtcaaggtggacctaaagttccccgcttctgtgcccacgggagcccaggacctcatctccaaactgctcaggcataacccctcggaacggctgcccctggcccaggtctcagcccacccttgggtccgggccaactctcggagggtgctgcctccctctgcccttcaatctgtcgcctgatggtccctgtcattcactcgggtgcgtgtgtttgtatgtctgtgtatgtataggggaaagaagggatccctaactgttcccttatctgttttctacctcctcctttgtttaataaaggctgaagctttttgtaaaaaaaaaaaaaaaaata

SEQ ID NO: 3068 - DNA, 316 bp, Homo sapiens
  misc_feature (1)..(316): n=a,t,g or c
gatccgggggcatgcagaagctgagcacaccccagaagaagtgagggtccccgacccaggagaacggtggctcccacaggacaatcgntgcccccnaacctcgtagcaacagcaataccgggggaccctgcggccaggcctggtgccatgagcagggctcctcgtgcccctggcccaggggtctcttcccctgccccctcagtttccacttttggggttttttattgttattaaactgatgggactttttgtgtttttatattgactctgcggcgcgggccctttaataaagctaggatacgcctttggtgcagct

SEQ ID NO: 3069 - DNA, 1215 bp, Homo sapiens
ctgggaagcagagtgtctggatggaacctgagctgggtctctgactcacttctgactttagttttttcaagggggaacatggcaaaggtgttcagtttcatccttgttaccaccgctctgataatgggcagggaaatttcggcgctcgaggactgtgcccaggagcagatgcggctcagagcccaggtgcgcctgcttgagacccgggtcaaacagcaacaggtcaagatcaagcagcttttgcaggagaatgaagtccagttccttgataaaggagatgaggatactgtcgttgatcttggaagcaagaggcagtatgcagattgttcagagattttcaatgatgggtataagctcagtggattttacaaaatcaaacctctccagagcccagcagaattttctgtttattgtgacatgtccgatggaggaggatggactgtaattcagagacgatctgatggcagtgaaaactttaacagaggatggaaagactatgaaaatggctttggaaattttgtccaaaaacatggtgaatattggctgggcaataaaaatcttcacttcttgaccactcaagaagactacactttaaaaatcgaccttgcagattttgaaaaaaatagccgttatgcacaatataagaatttcaaagttggagatgaaaagaatttctacgagttgaatattggggaatattctggaacagctggagattcccttgcggggaattttcatcctgaggtgcagtggtgggctagtcaccaaagaatgaaattcagcacgtgggacagagatcatgacaactatgaagggaactgcgcagaagaagatcagtctggctggtggtttaacaggtgtcactctgcaaacctgaatggtgtatactacagcggcccctacacggctaaaacagacaatgggattgtctggtacacctggcatgggtggtggtattctctgaaatctgtggttatgaaaattaggccaaatgattttattccaaatgtaatttaattgctgctgttgggcttcgtttctgcaattcagctttgtttaaagtgatttgaaaaatactcattctgaacatatccatgcgcaatcatgataactgttgtgagtagtgcttttcattcttctcacttgcctttgttacttaatgtgctttcagtacagcagatatgcaatattcaccaaataaatgtagactgtgtt

SEQ ID NO: 3070 - DNA, 3236 bp, Homo sapiens
gacccggccatgcgcggcctcgggctctggctgctgggcgcgatgatgctgcctgcgattgcccccagccggccctgggccctcatggagcagtatgaggtcgtgttgccgcggcgtctgccaggcccccgagtccgccgagctctgccctcccacttgggcctgcacccagagagggtgagctacgtccttggggccacagggcacaacttcaccctccacctgcggaagaacagggacctgctgggttccggctacacagagacctatacggctgccaatggctccgaggtgacggagcagcctcgcgggcaggaccactgcttataccagggccacgtagaggggtacccggactcagccgccagcctcagcacctgtgccggcctcaggggtttcttccaggtggggtcagacctgcacctgatcgagcccctggatgaaggtggcgagggcggacggcacgccgtgtaccaggctgagcacctgctgcagacggccgggacctgcggggtcagcgacgacagcctgggcagcctcctgggaccccggacggcagccgtcttcaggcctcggcccggggactctctgccatcccgagagacccgctacgtggagctgtatgtggtcgtggacaatgcagagttccagatgctggggagcgaagcagccgtgcgtcatcgggtgctggaggtggtgaatcacgtggacaagctatatcagaaactcaacttccgtgtggtcctggtgggcctggagatttggaatagtcaggacaggttccacgtcagccccgaccccagtgtcacactggagaacctcctgacctggcaggcacggcaacggacacggcggcacctgcatgacaacgtacagctcatcacgggtgtcgacttcaccgggactactgtggggtttgccagggtgtccgccatgtgctcccacagctcaggggctgtgaaccaggaccacagcaagaaccccgtgggcgtggcctgcaccatggcccatgagatgggccacaacctgggcatggaccatgatgagaacgtccagggctgccgctgccaggaacgcttcgaggccggccgctgcatcatggcaggcagcattggctccagtttccccaggatgttcagtgactgcagccaggcctacctggagagctttttggagcggccgcagtcggtgtgcctcgccaacgcccctgacctcagccacctggtgggcggccccgtgtgtgggaacctgtttgtggagcgtggggagcagtgcgactgcggcccccccgaggactgccggaaccgctgctgcaactctaccacctgccagctggctgagggggcccagtgtgcgcacggtacctgctgccaggagtgcaaggtgaagccggctggtgagctgtgccgtcccaagaaggacatgtgtgacctcgaggagttctgtgacggccggcaccctgagtgcccggaagacgccttccaggagaacggcacgccctgctccgggggctactgctacaacggggcctgtcccacactggcccagcagtgccaggccttctgggggccaggtgggcaggctgccgaggagtcctgcttctcctatgacatcctaccaggctgcaaggccagccggtacagggctgacatgtgtggcgttctgcagtgcaagggtgggcagcagcccctggggcgtgccatctgcatcgtggatgtgtgccacgcgctcaccacagaggatggcactgcgtatgaaccagtgcccgagggcacccggtgtggaccagagaaggtttgctggaaaggacgttgccaggacttacacgtttacagatccagcaactgctctgcccagtgccacaaccatggggtgtgcaaccacaagcaggagtgccactgccacgcgggctgggccccgccccactgcgcgaagctgctgactgaggtgcacgcagcgtccgggagcctccccgtcctcgtggtggtggttctggtgctcctggcagttgtgctggtcaccctggcaggcatcatcgtctaccgcaaagcccggagccgcatcctgagcaggaacgtggctcccaagaccacaatggggcgctccaaccccctgttccaccaggctgccagccgcgtgccggccaagggcggggctccagccccatccaggggcccccaagagctggtccccaccacccacccgggccagcccgcccgacacccggcctcctcggtggctctgaagaggccgccccctgctcctccggtcactgtgtccagcccacccttcccagttcctgtctacacccggcaggcaccaaagcaggtcatcaagccaacgttcgcacccccagtgcccccagtcaaacccggggctggtgcggccaaccctggtccagctgagggtgctgttggcccaaaggttgccctgaagccccccatccagaggaagcaaggagccggagctcccacagcaccctaggggggcacctgcgcctgtgtggaaatttggagaagttgcggcagagaagccatgcgttccagccttccacggtccagctagtgccgctcagccctagaccctgactttgcaggctcagctgctgttctaacctcagtaatgcatctacctgagaggctcctgctgtccacgccctcagccaattccttctccccgccttggccacgtgtagccccagctgtctgcaggcaccaggctgggatgagctgtgtgcttgcgggtgcgtgtgtgtgtacgtgtctccaggtggccgctggtctcccgctgtgttcaggaggccacatatacagcccctcccagccacacctgcccctgctctggggcctgctgagccggctgccctgggcacccggttccaggcagcacagacgtggggcatccccagaaagactccatcccaggaccaggttcccctccgtgctcttcgagagggtgtcagtgagcagactgcaccccaagctcccgactccaggtcccctgatcttgggcctgtttcccatgggattcaagagggacagccccagctttgtgtgtgtttaagcttaggaatgccctttatggaaagggctatgtgggagagtcagctatcttgtctggttttcttgagacctcagatgtgtgttcagcagggctgaaagcttttattctttaataatgagaaatgtatattttactaataaattattgaccgagttctgtagattcttgttaga

SEQ ID NO: 3071 - DNA, 40392 bp, Homo sapiens
gatcctcccagctcagcctcccaagtagctgcgaatactggcgtgcaccaccatgcccagctaatttttgttttttctggagagactgggtctccttatgttacctaggcttgtctcgaactcctggactcaagcaatcctccagcctcagcctcccaaagtgttgagattacaggggtgagccgctgcacctggcctaaaaaaaaattttttttaatacaacaacctaagtatgtataattgacatccatggaatgtaaaaggtatgggtgggtagaaaagaatatttgaataaataatagtcaaatgtgctccacatttggtaaaaaccaaaaactggtatatccaagaagttcaacaaaactgaagcacaggaatcatgaagcaaatgactccaaatgacataatagtcaaattagtaaaatctggtgatgaagagccacttaaaagtatgattctaagagtacatttctcattagaagcaatgtaagcaagaagacagtggagcaataattttaaaatactgaaagaaaacagctgtcaaccttaaattctttatccaacaataataactttcaaaagtggaggataaatataatgttttcagacatataaaaacttacagaattgattactatcactcttgtcattagaaatgacaaaagacacccctagacagggggaaaatcataccaaattgaaatatgaattcacacaaatatcagataatgcaactccatttgaatatataatcacatttgaagacagattttaataagtgatatatgtatcacaaagcctaaagtaaacattaaacttttttataaaagaattatgactagtaagctgtattaggattctccacagaaacaacataaatcagatatgcatgtatgttatacgtgtgtgtatatatatacatatgtgtatagtatatatatgtgtgtatatatatacatgtgtatagtatacatatgtgtgtatatatacatgtgtatagtatacatatgtgtgtatatatacatatgtgtatagtatatatatgtgtgtatatatacatatgtgtatagtatatatatgtgtgtatatatacatatgtgtatagtatatatatgtgtgtatatatacatatgtgtatagtatatatatgtgtgtatatggtgagagaaaaagaacaagagagaaactaattttgaggaattggatcatatatttgtggtagctgacaaggatgaaatatgttggtcaggctgaaggctggaaattcaagtaagagttgatgttgcagtcctgcatccaaatttagcaaggcagcacttcaggaaacctccacatttgttctaaaaacattcagctcactaaagagtcccacccacattgtgaagagaaatctgcttatacaaagtttactaattaaaatgttcatcacatctgaaagttatcttcatgtcaactcctatactggtatttgataaaatcaatctggtgcatagcctacccaatctaacacttaaaattaactatcacttaacccagcaaggaaataaaaagataatttaaaaaatcaatcaaaaaaggagacagcaaaagggaaagaaaactaacgaacatatgggacaaatataaaataaagagcaagaagatccttccagctcagcctactgagtttctgggactacaggaaggtttgtagttctccttgaagaggtccttcacatcccttgtaagttagattcctaggtattttattctctttgaagcagttgtgaatgagagttcactcatgatttggctctttgtctgtctgttgttggtgtataagaatgcttgtgatttttgtacattgatgttgtatcctgagattttgctgaagttgcttatcagcttaaggagattttgggctgagacaatggggttttctagatatacaatcatgttgtctgcaaacagggacaatttgacttcctctttttctaactgaataccctttatttctttctcctgcctgattgccctggccagaacttccaacactatattgaataggagtggtgagagagggcatccctgtcttgtgtcagttttcaaagggaatgcttccagtttttgcccattcagtatgatattggctgtgggtttgtcgtagatagctcttattattttgagatacgtcccatcaatacctaatttattgagagtttttagcatgaagtgttgttgaattttgtcaaaggccttttctgcatctattgcgataatcatgtggtttttgtctttggttctgtttatatgctggccacttctcaaaagaagacatttatgcagccaaaaaacacatgaaaaaatgctcaccatcactggccatcagagaaatgcaaatcaaagccacaatgagataccatctcacaccagttagaatggcgatcattaaaaagtcaggaaacaacaggtgctggacaggatgtggagaaataggaacacttttacactgttggtgggactgtaaactagttcaaccattgtggaagtcagtgtggcgattcctcagggatctagaactaaaaataccatttgacccagccatcccattactgggtatatacccaaacgactataaatcatgctgctgtaaagacacatgcacatgtatgtttattgtggcattattcacaatagcaaagacttggaaccaacccaaatgtccaacaatgatagactggattaagaaaatgtggcacatatacaccatggaatactatgcagccataaaaaatgatgagttcatgtcctttgtagggacatggatgaaattggaaatcatcattctcagtaaactatcgcaagaacaaaaaaccaaacaccgcatattctcactcataggtgggaattgaacaatgagaacacatggacacaggaaggggaacatcacactctggggactgttgtggggtggggggaggggcgagggatagcattgggagatatatctaatgctagatgacgagttagtgggtgcagcgcaccagcatggcacatgtatacatatgtaactaacctgcacattgtgcacatgtaccctaaaacttaaagtataataataataaattaaaaaaaaaaaagaaaagaaaatgtctctagacagcttggttcctgagctgggaatcaaccgtcttttctctccctttcaacccagagtgtggcaggcgcgccccctacaggcagctaaaagagctgactgagatgccgtctccatagggagggatttgggctgagaatttgggctgaggattttcccatgccctccctggcaggctggtcccaggacactcagaagacttactgttacaggtccagagcatttctcgtcttccttttctctctccttgccaagtgaccttggaattgttcctccccatctcagccccttcccttttgtgttaagtgcagtttgcagattttgtgttcctaggtcctgtatctgtagaattttagggaaagcagtgctggtcacccacatggaattcaagacagcgagcccaggaccagaaacacagacagcagtgggggtccccacagagcagcatggtgggcaccaggtggaggtaagaaaccaggaaccactcccctgagtgtcttcagccccaggtgaactagggaggggtcagtgggctgggctcaacccaccggggactctcctgtcactgccccagcagcaccatcctggaagcccctatatgtgctaagcagctgccaaagaacttgattaattacctgtaaatttcccttcaccacacctgaccacacatgactcctgcccccaaattactaatttattaaaatggcacaattagccgaaatggcctgaatccaggacccctttcaggtttgccgctgacctctcaggtcctcacacatgccagactctttccacaggggcctgactccactgtttccaacacaaatcccaggactcatttttctctgtcagtcctgacagcagttccagagacacttccccattaagatgtccccaggctcttataatacaacctgtctgttattttctgcctaaatctttttaattatccccatagcatttacaactgtaggaatctttgcctattgttaattttattaattgattggtgttaaatatttacttaattggtcatggatgcttttttaccacagaatcacacataaaaaacagacacaaacagctaagggtgtatttctcgctgcaataatacccaccactttcacgaagacaccagggtctttctcactttttgtcccaccatccctatgatattggctttattttcatccctgctgatgtgtgacctcagggtggctgctgcagctccagctatcactcccatattcaaggagaaaagggcctcatgaatctagtgctctttcacaagagcaaagctttcctaagaagaatttcacccactgatctcacaccccactgatcaggcctgagtcacatggtcaatcccagctgagcaggacctgggaatcacaggcaccagtcttttcggtgaatatagaagacagtgctcaggtggaaggtgacagggactgtctgctgggtctgcaaacccagttttcccgcacagccaaaccagcacgatgaacaactcacttcaagaaggctgtgtcttgttcctgctgaattcaccgcatggaacgtgtcccagaccacagtgggtctggattaacatttgatgggtggatgttcttctgtctctgactttggtgcaggagtcaccactgtacgctggtcctgcatccacagcggggaccagtaagagccagtccctgagtcctgtgatccccgccctgcatgccaagccctggtattacccccatgaccacccaccgcccagacacatgtgcaggcagcctcagatggaccttcctcctcctcttccaaatattcatgttcatattgtcatgagtaatctgcacccctcgcacctggtattgaggcaggcatgagtcacaaagagaagagaaaaatttcctccattggcaccagcagtctgcagaccagggaatcagggacctgaacagaagattttaattatacacccggacccaggaggcccttgagcctccagcagccagtatggagcagccaccaggggacagaacagagtcacctggcaaagtcacttggagatagggtagacctgggtgacaaggagatgctgacatgcagggagggtcagtgaccacaacctgagatctagaaaggtgtcgtttttctacagcatcatccttaacatcgagtacaaattctccaggctttgtgtttctcagctttgtctctggccaatgttgcatatttgacacaggtgcagacactttgcttccccctacacactggcccactcttctgtgctaaaacgctgtcattgccacaaacgccatcctcccctgtgggcacatgtgtttcatcaccctcctgtttgctctgagagccccctcattctgctacacagcaaagttttctttcagcatctaagctgtacctgaccatgaccacatactgggggtacataggcacagcacctgtgccctaccctaggagctcacagccaaggccaggaacttacagcatctcctgagtctttcaacactccgtgtgcacatgacaagggtgaagtttgattgtggaaagcaccactcagaagcaatggcaggtccctgcatgtgtgccagccttacggtgtcacctgtagagtggggtcatgagggtcactgcactgggttgaaaagtgccctccagagggggagctagaaccacacctaacttctggattttgccacaaaatatttagggacaggacacccctggagtcctcaattacccaagttattctgagccagtattcaacagaggaagtaccttagatctcagaataatccctcagtcgccattgtaagtcagtccctggccatctccacgcaggacaaggaatggccacatgggcaggacatcatactacctggaaaacgcacaaagaattcctctcagagttctgcatggccagatcagctcaggagtgaggccataacacaacctacagtgacgatgtcaacccagatgatgggaccagaaggagaatgagaattctgtgtgctgagggtgggtctttaggggccccctctctctctgtcccttggggctgagcccttctctggaaaccacacagctcctcctgcagcagcccctgactgctgatttgcatcacgggccgctctttccagcaaggggataagagaggcctggaagaacctgcccagcctgggcctcaggaagcagcatcggaggtgcctcagccatggcatggatccctctcttcctcggcgtccttgcttactgcacaggtgctgcccctagggtcctagccactggtccagtcccagggctctgggtccagcctggccctgactctgagctcagcagggcccccgcctgtggtgggcaggatgctcatgaccctgctgcaggtggatgggctcggcggggctgaaatccccccacacagtgctcatgtgctcacactgccttagggctctttcatccctggatctgtgtccaggccaggcacgtgggaagatttacttggagttcagctcctcagtttcaagccttttctctcccgttttctctcctgtaggatccgtggcctcctatgagctgactcagccaccctcagtgtccgtgtccccaggacagacagccagcatcacctgctctggagataaattgggggataaatatgcttgctggtatcagcagaagccaggccagtcccctgtgctggtcatctatcaagatagcaagcggccctcagggatccctgagcgattctctggctccaactctgggaacacagccactctgaccatcagcgggacccaggctatggatgaggctgactattactgtcaggcgtgggacagcagcactgcacacagtgacacaggcagatgcggaagtgagacagaaaccagccacctcggcctggctcacaagacccttccctctctcctgccctgtcacactgagcaggagggagccttccatgtggaatggaagtttccagtcctatccctgcccttatgttcctgagagacgggagcaagttcctgcccacctctaggctcagcttatcccagaataaactgagctagtcattttgatgatcaaatgccagctcccaaaagaccccagaaaccctgatatctaagtagcaccgactctattagtatcaagggagactagccctagggtggaatcattttagtgtctcagaaggcacagggcaatggaaagtgtttatgaggtttcaggatatgcacgtgagcagttaaaggcaggtcttacaaggaaggaacctactagaattggggcccatctgtgacatcatagcacagcctggtggacacagagaagggaaggtcctgaatcaagtcttgatcagtaaatatttattggataagtgagcaatttacataggtgagaactgtgtgctctcttgagcagaacacttacctggataattggttttcaggaattccctgaagcaatgagtgacattctttattgttttcaccctcatccacctgggaaagagtatcctggaaccagcagttaacattgacacagctggtctcggtcctcagcacaaacattcattgcaggctgaaaagtgacaacggaagagaaaggagtttattaaatccctagacacaaacaaatccataagcagagatgagagatgcgggctcagctggcccagtcccacaggggtcattcctcttgtgatggaaatgaccacatgagggtcccccaagcggtgttggggggcagtcatggggaactggcctcccagggctacctgctgcttgggctgggcagaggttagagggatggaagtctggtccagtccttcccagcagcatctccaggctcctcctccctctactggggcttcccctccactccccagaaccatcattgcttcctcatctcctgtctcctccctgccccaaggccctccctgtgctcaccctggctcctccccctgctccatgcccagcctctgcagagcagcccaggcccagagacttgggcagaagcttccgtcccaccagctgcagaaccttccctacagaaccaggccagtccctgtgtctcatatttgtagagatcccaatcaccctcagagatgacgggtgggaaaccagcccacagtgacctaggctgttgggcatatggccttcaagctggccttcaagcccacttggctgcatctccttggccaactccaacatccaggctgggagtctggaatcctagttcccctggcccattcactcccactagggttgcttctaaactccctgggcctcagcttcctagtctgcccactggaagcagcgacaggcattttccagggctgcggtaagggccctggaacaccctctctcaccctctctctccctttctctctctctctctctctctctctctctccccctccccctccccctccctctccctctctctctctgcctctgtttcctcctcagtagtgggaagaccccctgtcaggtgggccagtccatgacatctacagagggagcaggaacctctcctatttcctggaggagagctggggtggaggctgcaacccaggatcatcagaggagctggggtcttcaaggttcctagggaccccttaagcgggggtcagagtggcttcagcggtcttattgctcggtccagacagaagatgtttccagttgtgaaaaacgacttcagggacaacaaaaacagagattcgcctctccagacaccagtggttggtgtgcctggagtactcctcgtaccaggcaggggagagagtcctagacagaggaggttctaagtgtcacctagatttcaggcctcggggcctgtattgggtaggtgatgtcacagtgagttgatgctctgtagccccttccctaggaggtggcagagggaagagctggtggtcctctgaggtgtgagtgagtccaaccctgagggtcttcccaagctggaggtccctgggtgtagacggaagaggttctggtcaaagaggcctggtgttgaatcctggtccatttattcatttggtcaagaaatattcatggaggacccaatatgtgccaggtgccaagccaggtgactggggacacagtgttgagtgggacagttggctccttcactgctagaggtattatattctcaagccgagactcggctctacgattgtatgtcagatatatagcctctatgtgcatgtctccagagactggtttcctggagttccaagtgacagccatcactcacctcgaatgcaaaaattaaaggagcatccaaaaacctagtgacccagataaataatacttaatgcaatattttcaaaaatcaaaattaatgcccaacaaacccacaatgaacaaaatttcaggatctgactcactcacctcagtggttttgttcttggtcctacccacagtcccacaggtgagtgagtacccacagggatgcaaaaccagagtcaggcccctgcaccgccttctgcccggccaccagagccctcccctgggtcttggcctttctcttctgaagagctccagccagttcctcctcaggcttcctctactgctggtctcttctgccccctactggattctccccttacagctgcactccaggcagctggtggaggttaaagaacagaaacctcccaaaactccaccctccagttccaggctggctccacctcatgtccaaaaaggctggtcctccaggtctttgattgctattagtaagtcccaagacacagtctttacaccaagtcgctgtgtgccttgggcaagaaactctccctctctgagactgtgtttccacactggtagaagtagctagaagacctccctgccaggttggcaagtccactctgtgacatctacaaagggagcagggatctcttccatttcctggaggagagctggggtggaggctgcaacccaggatcaccagaggagctggggtctttggggttcctgaggactcctcagagggggatcaggagctgcagagccagcttctaactctggggactcagagatccagaacctttgtcatatccccagccaatactttgtcatcctgtgcctcagactcccccagatcccaagagtgagaagctcaagacgagacaagaaagaccagccagcttgaatttagggatggtggggagtggggagctggggacccctggacctgggggagaggagtctgcagtgcctgcaggtggagtttctgggacctgggggatggagactgggcaggggactgaccagcagaaggccaaggtgggggataccctcagacatggagcagggcagaagcaactggatggggtacatccctctgctttgggagagaagggccagggcgggacccagagagctctgcagaggcaccacagaccctcagcagggggtctgccaaacaggacagctggacttggctgcttctgcccaggcctggatccagcccttgcacatctcagggcaggggataggcctgggtggccagagctgcagctgcacctgctggggaggcctagtccagtcctccagggtccccagacagactcggatttccgactgcagccaccatggaaggatgtggtctgcggtgacgatgtctatccagaggccatggcaggtgcaagggtgggggtaggggcagcagctggggatgctacatttagggacagcccctttttatccccaagacctgggactgtccctgaaaggaaccacagcttctgggtcctgagcagtgggtgagtgtcatacccacagaggggctggaagggagcagcttcagcctagactcccagggcagaccctgccccagccccgaatatccaaggagcccaagatcagaggcaggaataggccaagctccccagtggagaagctgtgctggaccaggggtttcccagggccctcccttgtgccctgaatgatgtctgttagggcacctacaccctgttactgctcagtgccttgcctattttgaaggacagggatgtgtggtgattatttgtataatccagcccccagcacctggtcctcaaaagttacccaagcaatgtgtataaagatccagcctggagatctttgaaaaccgattcgatgagtcgaaccattaagtcatgatcaccatcctcaacttcatctctttcttcctcctcctcctcattatcatcaccttcaagaactgttaagagtctgagacttcatcctatttgcagactaaaaagtaagcctgccacagtgccatggatgctggcagaagatacaagactcctgggtcagagacaacgaataatctgtttttcacagcaatagcagttgccaaggtatcagcattgtcttgcaccagttccacaaggtgatgcaaagagggccaggtgacatctgcatgccagagctcagggatcccaaatatttcatacttgacagtaagcatatatctgtgttttgctccaaagagaggcattctctgtaccttccgaggttgttcactccacaaacactcttgaaaagataatccacaatcagtgcctttgcccgagagacatgcagaaatgcagagatccatagtagaccactgtctcccaacaaccatcaactttatcaatgaaatgaagtctcaggctatttgtctgttaccatagcccacaaaaatgtctggcttgattgtcaccaaatgtatcaaggaagttaaggagtatctgacacaaaatgtgaaccaagcaattctcaaaggagcctcccaggaaattcactttaggaagtcctaggaggctcctctgagagttgctaaaacaaaacattgagagtcctagagggctgcagatctgaacttgagcagatatttttaaagattttgtggcagaaaaagaaactggaaagcaagagggcagaccctcattgcagttctgtaatgtaagggggcagagcaggggcctttctcaccagagtatggggtcctgaagatctcctcaaacatttttatactaggctctcagggcaacagaaaagatgggagcgatgaatggggcgtaaaggagtgcaaatgacacaaggggtcacatgaagcaaaagaggtttattcaaccagatttagtccatgtttaattgagccactcctttgtgccaagctctgggttttcccatgcaccaagcagtgtgttaccacctagacccagagagccatgtcatcatcagcaaagcacgccctagtgtcatgcaaggaccaggcctcagattccgactccagacctactgcctcttggccctgtgacattaaaagagtagggaatcagcctgagcagcatttcctcatcttcaaatgtggaggacagtagatgatcttagctcccaggattagtgcttgtaaagcaataataatgtaatgcattattattgtattatgcatcatattcccatattatagtcaaaaaggaccccaacttaaagcacctgccagccctctcctcctccaccactgccgaatggagccaggcacgagtattccaggtggacagacgaatagaaatacaggggacgagccccttcctagatcctagcgcagcttgctccctacttaaggaatgatattggaccctgcattcatcttctctggatggtaattttctcacctgtaaaacagagacactggccccaaggacaccccacaagtagttgtgaatcccaaagtaagagaagaacaaaaaaagaaccagaatttattcaacacccactgagtgcttagcaaacacatggtttctttaactctcataagcttcatgctgcagaggaactctccccattttacagataaggaaactgaggcccagaggtaacctaggtctagatagactccacatttatgacttcaccactcttccttgcctgaaggatatagaatcactccctgcagggctcttgcctgactcaggaaagggccacaggatagccagccaggcttaaccaacccagccaagaaagggctggtcccaactggctggagtgcagtgtacaggcacccagcctggaagactgatcagaaaagaagccacagctccagccccagccccaaccccctgagctcaagcccttggggactcctgctgggcagctctctaggccctagggagatgctccacagacccaggctgccctttgggaagtggggaagacaagtgggtcaggtgtgcaccacccaggggcggggccaggcagccggctgtggtgggaggcagttgagccctggattgtgaccgcttcagggcagttggtagatgcccctctgggagagatccccaggggtgacagccatggaccctggaagggcctgggctagggacagggaccagagccagtccagggagaggacagagccaatggactggggtgtactgtaacagccctgctggcgagagggaccagggcaccgtcctccagggagcccatgctgcaagtcgggccagaggtgcccctgaacctgaaggccaatgagacccaagacaggccaagtgggttgtgagacccctgaggagctgggccctggtcccaggcagcgctggcccctgctgctgctgggtctggccatggtcgcccatggcctgctgcgcccaatggttgcaccgcaaagcggggacccagaccctggagcctcagttggaagcagccgatccagcctgcggagcctgtggggcaggtaaggggcaagagattccaggggatgtgggggtcctgcagcagagctgggaaagggtgaccaaggggagacaagccagaggagtgaggaggaaggttaacccctaagaggggcctgggctgacactggctttagtaatgggttgatattttgtccatcacagatttgtttgaattactgtttttaatatcatattacgatattatttttcttgatttctgagttttctggcgccacttaaattttcaccagggtcagtgcctcaatcacctagtcctagtcctctgggtagggaaggaacagaggcagggacaggacatccacagggggtggtggccactgtccccacagggtgcccaggcctgttcctccccctcctcctctctgcccatgtgcctcctgcccagtgagggcaggggccactccctggagaaggcagcaagggcttggtttggtctcccccaaggctgtctgttcaccaacttgcacataaatgcttactggggccaggctcaaggacacagggagggtgggatgaaccgaggggagctgtccagtcattggaacaggcccacggcccatgtttggagcaataaagggagaggggatctccctctgggatgatgcccaggctggtctcacagatcgaggggcactggctggtgatgggtgcccccaaaagacagagcagcgtcagaggagaggagagcacaggatgaggctgggagctcctgggtgactgggaaggggaggcaagaagaccatagggtccgtgcaccattcccagtccaggacgagtccttggatggatttaggtagattgattatcagagtcagatttgtgtttttggaaaaatcagcaccggattggaggctgatgcgacgcccgattagaggagggaggagagggggtgatggccaagtccagggtaggtggggatcctggaggaagccgtgccttggggatggggaggacactcagattcagagcacccaggggcccagtttcctatgaaatgggagcatgaagttgaagtgagggctgagcagaggggagcagacacgctcggggactgtctatgggcattaaaaatgtataaccattttagcaacaggcggcgagtcaaaaaacaaagtgtgtttatctaaactgggcaattccacttctaggaatttatcctaagggttggttgggggaataatcaaagctgtaaccaaatctttataacaagggtggttagctcagcattattagtgatgggagaaaactggaaaaaatccaaatatctaccagaaagggtgtgaaaaaacacaattgtatttgggggactgttgttgtttttgttttgaaacagtcttgatctgttgctcaggctggagtacagtggcgtggccacagctcactgcagcctcaacctccagggctcaaaagatcctccagcctcagcctcctgagtagctaggactacagatgcaggccactacacctggctaattttgattaggattattattagtttagagacagagcctcgctatattgctcaggcctgtctcaaattcctaagctcaagcaatctttctgcctcagtttcccacgtgctggaattacaggcgtgagccactgcacctgacccaactgtgtttttaaagtatatatgcattttcaaaaacctgtcagaaaatatagaaaaatgtcaatggtgtgtctggctggctgatgggatttcacctaattttaatgtggctttataattttctggttttgtgaagttgttcacaaaaagagacatttcttctaatataatttttaatacaacagtaatgtactcatgtgcattactctttttgtaatgagtatattacaaaatgtaatgacttttgtacattactcttttttcttgccaaaaaaaaaaaagattaagcagagaagtatataaagtaaaagcaagtgcttctgcttaccatctctcacctcttcccagagatagccactgtcaggttggtcaatatacttccagaacttttcctgtgtgtgtgtgtgtccctgaaaacacacacacacacacacacacacacacacacagttggtgctgggattttattttgcaaaagtaagagccatattctgcatattaccaacttttaatctattattgacactttctgtatcagtccatatggattaaccacattcattgcttataaactttgttttataagcaaagtttagatgagccagaatttatttccactaaaaaatctaaatgacaaatgatgctgcagtggaaatttgtgtgtgtgtgtgtgtgtgtgtgtgtgtgtgtgtgtgtgtgtgtgtatgtgtacaaagtgcacttatatatctccccaggatagatgcctaaaagtggaattgctggatcagagagaatgtacttttgaaatcttataggtagtgtttccaaaagtctgtgtccactcactccggtgaatggtagtgccttcgctcctacattcttaccaataatgcaaaattgttgatctttttatattctgcccatctgatgagcaaaaaattgaatgtgtttatggttttattgtgtattttattactggtgaaattattttttatatttttatttattggttttatttcgtctgtgaattaactggtcatcatgttgcccgcctttccattcagttgctttcatctttttatatatcaataacatattgggatatatttgggattttaaccacttgtttagtgtatgtattgtaaatatttttccctggtctgttttacgggtcttttgtttatggggtctcccaccataaaactgtggtaaatttttatgtgtcgaactggtttaatcttttctttatggtttctgtgacctccaccatgtgtaggaagttgtctttatttcaatattataaactcatttttctgttttattctggtacttttggtgtattggtgttttatttttttttctttacttcccctggagtttatttttgtggatgtaggaataagaccttattttccaaataggaaagccaatcatcacacatttgttgaatataaatgcaacttttctcaattactacattactgatttattacattctttctgtggttctcttggtttattgagctattcctgcgcccaccctgttttgattattttagctttatggtatgttcggtaactggtagggaaagaacccgtcattgttactttttctcaaaatagtcatgtctattatctgtcattcttagagttggactgcagaattggttctctaattttcaaaaatcattcttgtgttatgtggtaatatcacagaatatgggattaatttgagaactgctatctttataatgctcagtgtttttgttcagagacatgatgtactctccattcactcagataagtggtttaatattttattcatgcaaatcttgcacactttgttttttattcataaagggtttgtaaatataattttattgaagttataaattttttcacaattttatatcgtaaatgattactgtttctatagcaaggaaccctattaacttttctatgttgctcttgtatccagacactttaactcttgtattaattccagcagttcttcagctgattctccgtgtgtgtgtgtgtgtttgtgtgtttagttaactatcacaccatttgccaagaacaattttctctctttttctgtaatatttatacctccttctctcccccttttatgtcatttcattggctggaatctatacaatatgctgaataataaaagtgagactagacaaccttgccttgtttctgattctttaaatgttttgcctttaaatatgaaggttgctgtaaatttggggagatattcttcactgagttaagaaaattttcttcagtaacttaataaaaggctaaatgtttgctttctttatatgagaaacaagtgttgaatttatattactattatattaaattctgtttcaaaaatcttctgcacatgtcttaaatacaaatgtattaaatacaagctgctgctaagatgaaagttgctggccccatcacaatgggtatcttccaatgtgaataaattgccttggggaataaaatcagatttggaaaaacctgaggatggttgccatcataaactcttagagtgtgacctgggtgtttttctttttctctgtaggatgttaatagtatcttgtgtcatgctaggatgtctaggacagagggcaatacaatgaggggaaggcattctgcgatgtccccaggcctctggcttgaagagtaacttgctgaagtgaggactctgtggaggagcaagttatacagaaagaagtttagttgtgatctgttgagttggaggtgtctacagggcatccaagcagacataggttgaggaggcagaatatatgtgaatctggagccaagaagagaggtaagggctggaaatagggatctaagacccctggacagttgtgagtgtgcacaatgagggtcagatgcagagaaaattaggagactacagagagcagaacccagggtggggatctgggagtcagcagttgggcatgggcctggtagaaagggaagccaaggaggaggagagggggcagtctcagacaccaaggaggggagagtgactagaaagaaaaccttcttgcagagacataggggatggggaagaactgcagactgaactggggcaaaggactgttggccttaaccagagagatttgagggagagatgaggctgagagccaggggatcctgccatgtcccagcataaaaacagtacctgacacagatgggtgcttgggagctgttgtcggatgaatgagtggacagatgcatggatggacggatggatggaaggatgatagattgatggacaaacagatgaacagatgaatagctggatggacaactggatggatgggtagacagaatgatctcagagatcagaaaaagcttcatgcactaagtgggactgaaccgcgtctccatgggtagaaagcagaggaatctccacttgagtcaggaatgacccagtgctctcaatccagggagaaagccagcctggcttcactggggacacttgtgtgggggactcagaggccctttaaatgaggccagacgaggttggacaggtccaagccaactcagcactcctctgccacactgcacaggaggggatgtgtcactcagggagttgctgggacctatgggtcccagtgttgtcatcagcaccgacagcctcagagaggaaagacacacactggggtaactccaaggctgtgtgtggcacttgccttggacagcagacaggcacagggacacctctagggggctggccacccccctgcctcatgtctaggtcccagccccgcccactgcaaccctgtgcccgtcatgcccagcaggctcctgctccagcccagcccccagagagcagaccccaggtgctggccccgggggttttggtctgagcctcagtcactgtgttatgtcttcggaactgggaccaaggtcaccgtcctaggtaagtggctctcaacctttcccagcctgtctcaccctctgctgtccctggaaaatctgttttctctctctggggcttcctcccctctgtcctcccagccttaagcactgacccttacctttctccatggggcctggaggaggtgcattagtctccgggtaaccggcaggaagggcctccacagtgggagcagccggatgcagcctggtcccggggcctgagctgggattgggcagggtcagggctcctcctctcttccagggcagatgtctgagtgagggacagaggctggttctgatgaggggccctgcagtgtccttagggacattgcccagtgactcctggggtcaaggacagaggctgctggggtgggcctgggagctgctgagtctcatagtctaggggagcagccccaagaacagctgagggtctaggctgaggactggatgccaatccagcctgggagggccacacggcctggtgacacagaggtcaccccaaggggagaccaatggagggcacagagagggctctgggtctaggctgcagctctgtggcctgtgctgggtcatgaggacatggggacacagagggacgggtgagactgggtgaggtgccagaatccaaccctcccaggacagtcaccagaaaggagacagtctcttagggcagagatgtgtctgtccctggagccccgtcacctctggggcccagtgtctctctgttcacggatcggcctcctgccttcctcaaagggcatgttagactcaggaaatgaccagaggggagtgaatgaggggtgcagagaactccatggctaccaggtgaagtttggggtcatcacaggctgctggggtgggcctgggggctgctgagtctcatagtctgtgggagcagccccaggaacagctgaggtgaagggttctgtggtcgggcttgtggagacaggaaacatctcagagcctcagaggagccctgaggcttgtctaggtggagcccactccttgccaggagagccaagtgggctgggctggggcagagcccggtgcctgtgagggataggaagctccagttcaaagcaggcttgggtctccccacacactgcctgccaggacagtcctacaggatgagcaggggacccacagttcacggaggaggctctaggtcctggaagaataaagtgggtgatggaggggggtatagggatggaaatgagggatccaggggtcaaggccagattctaaactcagactccagagatcagagaagaaggaacacagcctgccctgggtatatggagaaattgaggctgtagaggagaggggctgggccaggacacctgtgaaaggtgacttgggagggctcctaggaaggcacagagctgtctgctctccacagggcatgagtggaaaggatggggaaagaagaggagagaaccccgggtggaccggatggccacactgtgaaccctcccagagactttagacagagagaggggctccacaacaccccggtattctgtctgccctctctcacccccttccctgtccacacaggtcagcccaaggccaaccccactgtcactctgttcccgccctcctctgaggagctccaagccaacaaggccacactagtgtgtctgatcagtgacttctacccgggagctgtgacagtggcctggaaggcagatggcagccccgtcaaggcgggagtggagaccaccaaaccctccaaacagagcaacaacaagtacgcggccagcagctacctgagcctgacgcccgagcagtggaagtcccacagaagctacagctgccaggtcacgcatgaagggagcaccgtggagaagacagtggcccctacagaatgttcataggttcccaactctaaccccacccacgggagcctggagctgcaggatcccaggggaggggtctctctccccatcccaagtcatccagcccttctccctgcactcatgaaaccccaataaatatcctcattgacaaccagaaatcttgttttatctcattttttttctcacataaattgctagcctccccggggttctcagtgtggggtacagggaattctgcacccagtgtgaaaatcacccaagggaggaggctcacagcctccctgagtcatctccccagagggtccttcctctcccagtcaccccttctccaactctccactgtacccctgagctaccagtctggcatcagttcagaccagtcccacaccctcctaaattttacttctcaataaatacctgatcatgtaaaacgcagcatttctaatgtgcagtctctgtctggtcatgtgtctgggctgaagggtcactgctcagggacagggggcagttccaggtgagatcccatgtctccgtcatcccacaccccacccaacctgccagggaaccgggtgagctccctgtgccagtgggaactgcaatccaaggcacaaaattgtcctgcagtccttgcccacctgggaagggacaggggcccagtgagaggtttgctggcgccctgtggggagattcaggagaaatgaagggggtccccggagaccagatgagggctagaggcagaaataatggaaaaaggacacccttgactcaaggccacggtctcagcaggaacagaaggtgaaattccccattgcatacgaggaaccagtcaggagagtgtttactgggtgagggataaataactgtgctgccactgggaacttgtaaaaacattgggaaaggaaacatgcaagtgtctttctaagacttgtacaatggacattggctaagtaaacatactgacaagtcctgcactagggaaccagtttaatatgatgagccacagcatatccaaaagcatgttgatctccttcttcacctttagaagacccaaaacactctgaaagataccagcgtttcctggaactagtttgtggaatatggggtgaggttgatgcacatgatgttacgggtatatgatcacatggctgtgggttggggatcaggctcaaagttaacactagcgtggggctggatgtcaagcatgaagggtgtggaccactaagtcaggcccaggtagagttaatttctgattggtttgtggctggagcttgatgatggtcagtctgcaggagcaggaggatgtggggaaattgggaaaatgagaaaagtcacaaatccaagctcaaactctgcatctattgattgcctgggggaggctaatcagagttgaattcaggatgagcttcagggctgggtcagactgaataagagctgagtgaatgtgggctgatggctccaggcaagtcctggcctccactaggagtcagatcccacaaaccctcctgcccgcagagcaccctctccctccgtagctcatggtggcgcagcctccccaccccatcccatgtacacctgctgcctcatctcagagacactcattccagtgtctctgacagcagatgatgtcagcctcctgggtgtggagaccccagctgtcttggagagtcctcagtgcctgggtactctcagaccccctgtctctgcctccagcacatcagagacatagcagctgcctccaccagagctgctgggtgatcccaacaggccagggacagagcctgcaaagacaggaatctctgcagtcacaatgaggcaaagaaagagccccttagagcttgatcacagccacccctgatccaaatcccagcctctcattagaaggaggcttgagggttctgttgccacagcacctgtctgagcccatttcatggaggggaaaactgagatgaccaagggccagatccatagtcctgctgggcacaaggccatccccagcagctgcctaatctttgactgtgttataagtttccattatggaaaactttgaacacatacataaggagacagagaaataataatgcccccaagttcccatcacccagcccccccaataagcaattcacagacattactgacccacccatagcagaataacccctccattacacaataccagacatcacatcttttcagctgtaaatatcccatttctatgctggaaagatatgggcttaaaagtaactgcaatattattaccaaacctaaatagaaattatcactaattccctaatatcaagaaataatcatgggctcctcaaatccctcacaaatgccagaagcgtattgacttagttaagtgttggtgctgtggttattttggggttttgggtggtttatttcagaattcaatatggcatcaaatggtgatgggcgcatgtgctgtcaggccagttgtcactggtgaatatttcctcaattgctctagtgctgcctggcaaggcaggagctgcaggagttgagagctgtccggggaccttcccacggttggaatacagccacacctcccaaaacaagaacccagggctatcatctacttctttttttttccccctgcaaaatggttctagcatggagggacttaactggattcagactagacattgcaaaatagcttccaaggacagggagctgctaacagcgagatcacccatgtcagattctcactcttgtagtaatgttagctgcataggatggtcaatagctacatccctcagaagggaaggaaggcagagggatgaggcttcagttcacctccttctcatgagtgctgcagagcatctgtgaattcagaggtctgcagctgggctctgttcacccaggagtgtgcttcatgctctaggaaggagccactttgcacacagatgatccggggcccagccatccttccagggtgaataattaatgtcttctctcatggtgaactctaggattcaagccatctaatgtttttgaagccactgtcattatatttaattgatgatgacaggtggccaccaatgatgaatattttcccagggggagtctccctaagtggctttagacttcctcacatggccccaggggattaaatggctcctgattactcagaggataagaggttctgtcttatcatgttcctttcttatttgtcttatgtgtctttcctgccccaggcctgggatcccccactgatctcccttcccttagtgagaggtggtatttggagaccacattctggaggctcccttatgtcccccatttgaaaaagacaacggcagccaccaccccagctgtcccacccaacatgaggccagattcggggtgcagggatgctcccaaggttaccctaacagatgtgactggcacttcatattgggaccagccaggcctcactgaccaggcctatccaactagaactactccagaaggtggggctgaaacccaccaaggttcccagaacactgcactctagggcaatcagcctctgcatgggaggagaggggcaccctctgcaccaccccatggtgttaccaaaagttgaaccatgggttggttcaactttgcagagaagagaccacctaacccatctgtggaaattcactccttagcgatactgatgctccctaagaaattcaatcctgggcctgagtgatggttggtgcaaaaaacaaattcaagatcccagtgtcctccagaagcctggatttccagggatcctgctgtgagtcacaggacgtcaccggtccccttctctttgtgggttgagtgtgggggccatgtggactccctcatgagcagatgccaccagggccactggccccagcttcctccttcacagctgcagtgggggctggggctggggcatcccagggagggtttttgtatgagcctgtgtcacagtgtgtggtattcggcggagggaccaagctgaccgtcctaggtgagtctcttctcccctctccttccccgctcttgggacaatttctgctgtttttgtttgtttctgtatcttgtctcaacttgtggtcagcctttctccctgcatcccaggcctgagcaaggacctctgccctccctgttcagacccttgcttgcctcagcaggtcactacaaccacttcacctctgaccacaggggcaggggactagatagaatgacctactgagcctcgtctgtctgtctgtctgtctgtctctctgtttgtctctctgtctctctgtttgtctctctgactgtctgacaggcgcaggctgggtctctaagccttgttctgttctggcctcctcagtctgggttcttgtcggaacagctttgtccttgggttacctgggttccatctcctggggaattgggaacaaggggtctgagggaggcacctcctgggagactttagaaggacccagtgccctcggggctgatgctcgggaatcacagagctgggacccagagccaggatccagacccagaatgaggtaggaggtggaggggctgccctgggcgtctgggggctgccagggactgagccctgagccagcctgagactcaggaaaccccgtcaggagggagaagggagaagcagactctggacaccagaaagccaggggaagggtcacaaaaggagtggatgtgacggaagggcgggctcctgggtctcttcagaacatatcccctgtgcccagggggatcagaggggcagagtccactgcgtgaaagccccactgctatgaccaggtagccgggacgtggggtggatgccagaaaagactccacggaataagagagagcccaggacagcaggcaggctctccgatccccccaggcccttgccccatacacgggctccagaacacacatttggctggaacagcctgagggaccaaaaggccccagtatcccacagagctgaggagccaggccagaaaagtaaccccagagttcgctgtgcaggggagacacagagctctctttatctgtcaggatggcaggaggggacagggtcagggcgctgagggtcagatgtcggtgttgggggccaaggccccgagagatctcaggacaggtggtcaggtgtctaaggtaaaacagctccccgtgcagatcagggcatagtggaaaacaccctgacccctctgcctggcatagaccttcagacacagagcccctgaacaagggcaccccaacacctcatcatatactgaggtcaggggctccccaggtggacaccaggactctgaccccctgcccctcatccaccccgcaggtcagcccaaggctgccccctcggtcactctgttcccgccctcctctgaggagcttcaagccaacaaggccacactggtgtgtctcataagtgacttctacccgggagccgtgacagtggcctggaaggcagatagcagccccgtcaaggcgggagtggagaccaccacaccctccaaacaaagcaacaacaagtacgcggccagcagctatctgagcctgacgcctgagcagtggaagtcccacagaagctacagctgccaggtcacgcatgaagggagcaccgtggagaagacagtggcccctacagaatgttcataggttctcaaccctcaccccccaccacgggagactagagctgcaggatcccaggggaggggtctctcctcccaccccaaggcatcaagcccttctccctgcactcaataaaccctcaataaatattctcattgtcaatcagaaatcttgttttatctcattttttcttttctcacatataattcctagcctttcctgggttctcaatttgtggtggaaagaaccctgaacccagtgggaaagttgcctatgtgaaggggttctcagttccctgggcatctctgcaggtaaggccttcctcacccagacaccccttcctcagctctccactgtacccctgagccaccagcctcgcctggctgggaccaggggggtgtcacactctcctagattctgcctttcaacagaaacctaaccacgcatcacacggcacttctcgcatgccttctgtgtctgctccagtctctgggctaaagagttgctggtccgggacaggggataggtccgctcttggtcagatgccaggtccctgccatggcatccctgaccctatgcaacaagccagtgactctggtgagctctctgtgtcaggagaatccatgatccagagtttcatattgtcctgcaagcatctggtgggctgtagctcttgccaaactgggaaataccatggcccagcatcaggatgcaggacagtccggagagggaaatcaggagaagtgaaggggtctctggggagcccagatgtgggctagaggcagaagtaagggtgaagagcacctatgagtcaatgtcatggtctcagcaggaacacagttgaaaatccccattccacacaagaccgtttagcaggaaaggagtccatacttgtgctgccaccaggatgtcctgagaagccttggagaatgaaacatacaggtgcatttcctagacttgacaatgcacgttagccaagtaaaggcaatgaaaagttctctactagggaaataatttcctgtggtaaagcttagcttatgtaaagtcacatttatccatctggcacctctaaaagccccataatattctgcaagatactagtatgtcatggaagtagtttatgaaacataaagtgagatttaagaacaaagatgttacgggtgtatgataagatggctacaggctcagggtcaggctcgaggagtgaaggaggccgtgtcaaattcatgacaagagttggagctgggccaggctgggtcagggctgtgtgaatgcagacagagggctacaggcaaggtcaggcatccatgaacactcagctcccccagaccctcctgcccactgggaccttcgccctcccttggtcacagtggtggagccttcctacccaaacctctatggaggccctggatgactgtgcgttcttagtgcccacgcaaacttagactccctgtctctgcctccagcacatcaggaatgtggcagctgagttcaccagagctgctgggtggtcccgacaggccagggacagagcccgcaaagacaggaagctctgcagtcacaatgaggcagagaaatggccccttggtgcttgatcacagccacccctgatccaaatcccagcctctgaattagaagaaggctaaaaggttctagtggccacagtccctgtctaagcccatttcacaaatgagaaaactaagaccacccaaggagggccagttacgtaggcctgctgggtacaaggccaaggtctacttcacacccagcagctgtccaaagactgagctgtgtcataagtttatattatgaagaactctgaacatataaataaggagacagaaaaataacagtgtcccatgttctcatcacccagcactcaaaataagcaattcacagatgatgccgacccacccacagcaaaataaattctcccttacacaacatttagaaagaaatacaagacatcagatctgttcagctgtaagtactccattactgtcctggaatgacatggaccttaaaataactataatatcactaccaaacctaaatagaaattatcactaattccctaatatcgagaaataagcagggtctcctcaaatgcatcagaaacaccagaagtgctttggcttagttacatgttggtgctgttggtatttgggggtttaagtttatatgaggagcaatatgacatcaaatggtgatgggtgcatgtgccatcaggctggttgtcactggtgaatatttcctcaattgctctagagcctcccggcaaggcaggagctgcaggagctgagagctgtctggagaacttcccctggctgctatacagccacgcctcctggagcaggaacctagggcttccctcagcttttattttcctggaaaatgattctagcatgaaggggattaacttgattcagattggacattgcaaaatagcttgcaaggacagggagctgctaccagcagagtcacccatgtcagactgccactcttgtagtaatgttagctgcataggatggtcaatagctacatccctcagaagggaaggaaggcagagggttgaggcttcagttcacctccttctcatgagtgctgcagagtgtctgtgatgtcagaggtctgcagctgggctctgttcacccaggagtgtgcttcatgctctaggaaggagccactttgcacacagaagatccggggcccagccatccttccagggtgaacaattcatgtcttctctcatggtgaactctaggattcaagccatctaatgcttttgaagccactgtcattatatttaattgatgatgacaggtggccaccaatgatgaatattttcccagggggagtctccccaagtggcttcagacttcctcacatggccccaggggattaaatggctcctgattactcagaggataagaggttctgtcttatcatgttcctttcttatttgtcttatgtgtctttcctgccccaggcctgggatcccccactgatctcccttcccttagtgagaggtgatatttggagaccacattctggaggctccctcatgtcccccatttgaaaaagacaacggcagcctccaccctagctgtcccacccaacatgaggccagattcaggggtgcagggatgctcccaaggttaccctaacagatgtgactggcacttcatattgggaccagccaggcctcactgaccaggcctatccaactagaactactccagaaggtggggctgaaacccaccaaggttcccagaacactgcactctagggcaatcagcctctgcatgggaggagaggagcaccctctgcaccaccccatggtgttaccaaaagttgaaccatgggttggttcaactttgcagagaagagaccacctatcccatctgtggaaattcactccttagcgacactaatgccctctaataaattcaatcctgggcctgagtgatggttggtgcaaaaaacaaattcaagatcccagtgtcctccagaagcctggatttccagggatcctgctgtgggtcacaggatgtcaccggtcccctctctctgtgggttaagtgtgggggccatgtggactccctcatgagcagatgccaccaggaccactggccccagcttcctccttcacagctgcagtgggggctggggctaggggcatcccagggagggtttttgtatgagcctgtgtcacagtgttgggtgttcggcggagggaccaagctgaccgtcctaggtgagtctcttctcccctctccttccccgctcttgggacaatttctgctgtttttgtttgtttctgtatcttgtctcaacttgtggtcagcctttctccctgcatcccaggcctgagcaaggacctctgccctccctgttcagacccttgcttgcctcagcaggtcactacaaccacttcacctctgaccgcaggggcaggggactagatagaatgacctactgagcctcgtctgtctgtctgtctgtctgtctctctctctctgtttgtctctctgtctgtctgacaggcgcaggctgggtctctaagccttgttctgttctggcctcctcagtctgggttcttgtcggaacagctttgcccttgggttacctgggttccatctcctggggaattgggaacaaggggtctgagggaggcacctcctgggagactttagaaggacccagtgccctcggggctgatgctcgggaatcacagagctgggacccagagccaggatccagacccagaatgaggtaggaggtggaggggctgccctgggcgtctgggggctgccagggactgagccctgagccagcctgagactcaggaaaccccgtcaggagggagaagggagaagcagactctggacaccagaaagccaggggaagggtcacaaaaggagtggatgtgacggaagggcgggctcctgggtctcttcagaacatatcccctgtgcccagggggatcagaggggcagagtccactgcgtgaaagccccactgctatgaccaggtagccgggacgtggggtggatgccagaaaagactccacggaataagagagagcccaggacagcaggcaggctctccgatccccccaggcccttgccccatacacgggctccagaacacacatttggctggaacagcctgagggaccaaaaggccccagcatcccacagagctgaggagccaggccagaaaagtaaccccagagttcgctgtgcaggggagacacagagctctctttatctgtcaggatggcaggaggggacagggtcagggcgctgagggtcagatgtcggtgttgggggccaaggccccgagagatctcaggacaggtggtcaggtgtctaaggtaaaacagctccccgtgcagatcaggacatagtggaaaacaccctgacccctctgcctggcatagaccttcagacacagagcccctgaacaagggcaccccaacacctcatcatatactgaggtcaggggctccccaggtggacaccaggactctgaccccctgcccctcatccaccccgcaggtcagcccaaggctgccccctcggtcactctgttcccgccctcctctgaggagcttcaagccaacaaggccacactggtgtgtctcataagtgacttctacccgggagccgtgacagtggcctggaaggcagatagcagccccgtcaaggcgggagtggagaccaccacaccctccaaacaaagcaacaacaagtacgcggccagcagctacctgagcctgacgcctgagcagtggaagtcccacagaagctacagctgccaggtcacgcatgaagggagcaccgtggagaagacagtggcccctacagaatgttcataggttctcaaccctcaccccccaccacgggagactagagctgcaggatcccaggggaggggtctctcctcccaccccaaggcatcaagcccttctccctgcactcaataaaccctcaataaatattctcattgtcaatcagaaatcttgttttatctcattttttcttttctcacatataattcctagccttccctgggttctcaatttatggtggagggaattctgcacccagtgggaaagtcacccaagggaggaggcttacagcctccccgagtcatctctctggaaggtccttcctcttccagtcaccccttccccaactctccaccatacccctgagcctccagcctggcctcagctcagaccagtcccacaccctcctcaattttacttctcaataaagacctgatcatgtaaaacccagtttccaatgtgtcgtctgtgtctggtcatgtgcctgtgctgaagggtcactgctctgggacaggaggcagtttcaggtgagatcccatgtccccgtcaccccacaccccacccaacctgccaggaaaccgggtgagctccctgtgccagggggaaccatgttccagagcagaaagttgtccctgcagagtggtccctgaaatgcagttcttgcccacctgggaaggatgtggagcctagtgaggacagagtggtggccctgagcagggcatcggggagaaacgaggagtgttccaggaccccctgctttgggctagagacagaaaacccttgagcccaggccaagatcagagcagaaacagggttgaacttccctgtcccatccatgatacccagttaggagaccatttactaggtgccatcaccttacgttacattacaacattacgtgattgtgccatcacccgggagacatgaaaaaggctggaaaatggaacccttcagtgtagtttacactttcacaatgtacgttagctatgaaagatgctgacaagtcctgcagttggaaaacagttcatgttacataaccttgcaagtcaagaattctattcagtgtcccaacccacttagccctagagcgctcttcaagacactggtgttcatgtcactagtgctgggacatgggctgaggctgaggcacacagatgattcgttgtgatcaaatgggtcaggctcagggttaacactggccaggtcagaaagagagcatagggctgagatctcaaccatgaagagtctcgaattctaaagtcaggggacgcagtagagttagattatggttatggctggagccatgatggccagcctgtgtgagggtaggactcaggtggactgggtcaaatgagaaaggcaccatcccaagcatagaatcggcatccattggttgtctgatggaggctgtgtcaaaatcatactcgcccaagaatcagggccaggtcacactaggtcagggcagggtaagtgtgacttaagggctacaggcaggtcaagttttcatgggactcagctaccttagacccctccccaccagggcctactccctccctcaatcatgtggttcagcccctccatgtgcacctacaccctgatgtcagagacacaatcatcccagggtccctgacagcgagtgaggtggccttgggagatgcacttcccagccctcctcatcagtcttgggcactgtcaggccccttcttggtgcctccagcacatcagcggtgtggcaggtgccttcaccagagctgctgggtggccaggccaggcctgagacagagcctgcaagggcagagaactctagggccatagtggggcagagaaggggttcctcttggagcctaatcatagaacccctgcctcaagtcacaacctacaagttagaaggaaacttaagggtcctgattcccaccaccctgtctggccccatttcatagatgtgaacgctgagacccctatagcaaagaggaccgctttgatctccaccttctcaatggccctgctgggtaggatcccctctggatgtcccctggtgctgtcccaagactaatctctctaattactgccttgtaagatattacggaaactgacagcaagaaaataaaaaaacaggaggataatacagctcatgttgacccacccacaatcaagtaacctcttttacacagttgtttgaagcaaattgtagacatcatgtccattagtctaaatattccatttgtgtctctaaaaatatggacccccccaaaaaaactacattcttacaaacctaaatataaatatctaattctttcatatcaaaaaaagaatgtttcccatcaaatacttcacaaatatcctatgcttctttcactagacctgtgtttgtgttgttattctgtggttttccatttcatttctatgaggattcaatatggtttgaaattgtgactggtgactgtgtttttagacctgttctgtctgcaggtatcttcctcattgatttttaatttccttgcaaggcaggagctacaggagctgggggttggtcccaggaccttcccatggtcaggatacagcctgtggcctccccaagctggaaacaagcgctcctctctgcttctgcgtttcctgaaaattggttcttggccagaaaggtttaacaaggctcagtgtgacttttcagcaagaccgcttggctactgggctcccatgtggggtcatctatttgtgacgttagctgggcttcacactttgtatccagtgccattagatggtatatggatgcaaggtgactgcatttcagttcgaccaccttttccttctactgactgtctgtaaaaggtgtgccctcatatgttctttgctcctctgggagtgtgattcttatttcagtaagaaatagcatagacatgttgagtctttcctttcatttagcatcttaataatgatgaccatgttgcctgccatctcgtgaagatgaacaattatttcatggtgagctcaaagttatgttactgtatgtgactcacttgagtccaccatggttctattttattgatgatgacaacgacccaccgtggcccactcagtgcctcttctggtggccccaggatcctcctgaaggaacccaggagacctcgatggctttccactctctgttcacaatctatcctgggcacatctttctcctgccttgtgcctggaattgcccattaaccccaagtggactagtccccataactgggaggtgggatttagtgaccacacttggggtgcttctcacacagcccttttgagtcagacactccagacatacccagaaatgagacaagaccctgaaagggtaacaggggcttgcttccaacttctccctggaggttgaggctggcatttcatactaaaacctagtgagacccatcccaaactaagacaacacaaggaggacggaagtgagacgccctggagttgtggttgtggtcacgttggagcttcccatgactgctgactctggggcaagctgcccctcctctaaggcactcactggggacacctgaggacgcctcctgctcttaccctgtagtcacaccaagagatcagggttacaacaaccctatagagaatccctgtccccttccatgtcacttcactccttcgtgaagcaaatgccctcaaggagctcattcccattcctgggtcacagtcacctggaaaacctgatccagacaccaacctcctcaggcctcgccatttccagacgtcccgttactgcatacgcttggtcgactgtcccatctcagcttgagaagggcaggcaggtgtgtggactctgctgagcaaatgccttccaggggcagtggtctggcttcctgcaccatagcttcaggtgggggatggggagggggagttaggggccccagggaagagtttttgtatgaacctgtgtcaccgcattttgtatttggtggaggaacccagctgatcattttagatgagtctcttcttccctttctttccctgccaagttggtgacaattttattctgatttcgatctttgtctgtgacttgccacagcctgtggtcagggtttcctttgggacctcggtcctgggaggctgatctctctcctccctattcagacccctgtatgcctcagctggtcactgagacaccttcatctcctctgaccccagaggcagggagctccaagacaaggccacactggtgtgtctcatgagtgacttctacccgagagccatgacagtggcctggaagatagatggcatcaccatcacccagggtgtggagaccaccacaccctccaaacagagcaacaagtatgcggccagcagctacctaagactggcacccgacagtggaagtcccacaacctctacagctgccaggtcacgcatgaaaggaacactgtggagaagacagtggcccctgcagaatgttcttaggtccccgaccctcacctacacacgggggcctagagctgcaggatcagggcatgtgtctcccctcccactccaagtcatccagcccttctccctgcacccagtaaccctcaataaatatcctcattgtcaaccagaaatcctgctgtctgtcttcatttcttatctcatatttagtttgcaacctccttaaattctaagcaaggatgaggaaaatccaggtgcccagtttatcgggtgagaagtccatggtggtgccatcaccaggaacttgtggaaaggtctgggaatggaaactcacaggtgaatttcacagattttcacaatacagggtggctaagtaaagacacttacaagtcctgcaatagggaaacaggaagtccagaatcctgctcaccatcccagccaacttagtgagccctaggatgctctgcaagatactggtgttcacgtcgctagctctggaaagtggggtgaggctggggcacacgggtgatcagttatgatcagatgggcttagggtgaggttcaaagttaaccagcacgtggctgagatctcaaccatgaagttcccaattctaaagtcaggctctggggtggagtgagtatgtgcttggtgtgtggctgagcctgtgatggtcagctcgtgtgaggggaggactcctgtggactgagacaaatgagcaaagacaccatcccaggcacagaacgggcatcccatggttgtcggggagagtctgtgtcagagtctcattctggactagagtcaaggctgggtcacgcaaggtcagcacagggtgaacatgacctaggggctatctataggcaaagtcaggctttcacgggatctcaactgccccaaacacccccatcccaccaggccccactccctctgtcactcacgttgttccgtcccctcaccccctgcaccatggtgcaccggcagcctcactcagagacaccctcatcccggggtccctgacagtgggcaatttggtcccttgaaggccttgacaggctcggttaatccatagtgcccgggctgggacccccactgtttctggttcatcagggacatggcagcagctgctgggtggccagccaggacaggaacagagctgcaaggcctgggggctttttccacaatgatacacaaagagaggggcccctttggagctcagtcccagccacccctgccccaaatcacagccgtgagctgaattgaatttcaggtgcccagagtccctcagcctctgtttgacccatttcacagctatgaaaattcaagcccatgggagacactgtcccaagcttcaccctctctataagttgtacatttttatgatgaagatctctgaacacaaaaatagggagacagaagaatagtaatgactccaaggttcccatcagccagtccgcagcatcatccattttcagataatgcggacccacccacagcagaataactaaactactccttcaagcaagggtgtgaagcaaatgctagtcatcacacacacaactggagagaatatcaaggatttcttgacatcaaaaatagttaatgagagtcttatcaaatgtcttgtgaatatcattgtgtctatttttgtcgactttgtggtgctgttgcatatttgtgatttaatttcatttctatgtggattaaatacttgacgttatcattggtgaatgtgtttttagacccattccatctgcaggtgtctcccaaattgctctagctttccctggcaaggcaggagctgcaggagcagagagctggtcccgggacctcccacagtcgggatgcaggcgccacctccctgagcaggaacccagtgcttccctcaacctctcttttcctgaaaaatggttctagcatcaagaggctcaagggggttcaggctggacattggcaaactcgcttcccaggacacgtggctacttccagcaaagccacccatgttgtgttgtcattctttcagtgacattagctgcatttgatgatcaataacttcgcgcctcagatgagaaggaaggcagatggtcaagacttcggtccacctccttctcatgagggcttccagaagggagggcacagcagctgcaccgtgcgctcaggagtgtgcttcatgctttgggaagaagaaaaaatgtacattcttcccttttgttcaccactttgataactgatgatctggtgcccagccatcctccagggcgcacagcacaatgtagtaccggagtgagctctagcgtgtgaggacatctgacatgtgggctccactgcagatatactgaattgcaatgacaatgcggctacaaaacataaacatttacccactgggcgcctcctcaggtggcatctgattttctcccattgccccaggagcttccatggctcctgatttctcggaggatgagaggttctgtctcatcatgtccctttcctgccccaggcctgggatcccgcactgacctcacctcccttagcagaaggtgatatttggagaccacactcgggagctcctttatgtccctcacatttgaataaggcagtggcagccactaccccacctcacccaccaaaatgagaccaggttgaggggtgcaggagatccttccattttaccctggaggatagggctggcatttccagtggggaccagccaggcctcactggccaggcccatcccaactaggacaagcccagggaaggctgggctgaggctcctggagtcacagataggttcatgggaagcttcccaagacaccgcactctagggtaaccagcttcttcctggagggagagggcactctctgcatcaccccagggcgtcaccaagcagtcagtgtcgagtcagctccaccagggagaccatttatccctgaccatgggagttcactcctagtgacacagtgccctccaataaactcatccccatggctgcatgatggttggtgggaaaaccaaatccactgtcctccaggaaccaggatttctagggatcctgctggtcacaggatgtcacctgtccccttctctctgtgggggtgagtgtggcagccgtgtgaactccctcatgagcagatgccaccaggggctgtggcctcagcttcctccatcacagctgcagcgggggttgggggtagaggcgtccagagagggtttttgtatgagcctgtgtcacagcactgggtgtttggtgaggggacggagctgaccgtcctagatgagtcttttccccctccttccctggtctccccaaggtactgggaaattttctgctgcttttgttcttttctgtatcttgtgttgacctgtggtgatgctttctctctggagcctaggccctggtcaaggacctctcccctccctgtttagacccttacctcagtgggtcaccaagaccccttcacctctgacctcagatgtagggcactagactggatgacctactgagactcatctgtctgtctgtctgccagagccaggctgcttccctaaaacttgctcagttctgtcctcccccacctgggcttctgtctaacgaactttgtgcaagggaaactgaggccccatctcatgagggagagggaacaaggggctcgaaggagtgaccacctggtggactttagaaggacctgaaaccctcagagccaagataggggaatgaaaactcagagtctcagggcccagtcccctggactgtgggactctggatc

SEQ ID NO: 3072 - DNA, 3088 bp, Homo sapiens
gctggaagggtttctttggccctgagtgaagagagacccagagggaacactgaggtgcctgcccaaccactctgtcccggtttccttcagcaggaccaggtgagagaagccatgctggtcgttcagatgcctttctcctttcccatggcccacttcatcctctttgtctttacggtttccactatatttcacgttcagcagcggctagcgaagattcaagccatgtgggagttaccggtgcagataccagtgctagcctcaacatcaaaggcactgggacccagccagctcagggggatgtggacgatcaatgcaataggccgcctggggaaccagatgggcgagtacgccacactgtacgccctggccaagatgaacgggcggcccgccttcatcccggcccagatgcacagcaccctggcccccatcttcagaatcaccctgccggtgctgcacagcgccacggccagcaggatcccctggcagaactaccacctgaacgactggatggaggaggaataccgccacttcccgggggagtacgtccgcttcaccggctacccctgctcctggaccttctaccaccacctccgccaggagatcctccaggagttcaccctgcacgaccacgtgcgggaggaggcccagaagttcctgcggggcctgcaggtgaacgggagccggccgggcacctttgtaggggtccatgttcgccgaggggactatgtccatgtcatgccaaaagtgtggaagggggtggtggccgaccggcgatacctacagcaggccctggactggttccgagctcgctacagctccctcatcttcgtggtcaccagtaatggcatggcctggtgtcgggagaacattgacacctcccacggtgatgtggtgtttgctggcgatggcattgagggctcacctgccaaagattttgctctactcacacagtgtaaccacaccatcatgaccattgggacgttcgggatctgggccgcatacctcacgggcggagacaccatctacctggccaattacaccctccccgactcccctttcctcaaaatctttaagccagaggcagccttcctgccggagtggacagggattgccgcagacctgtcccccttactcaagcactaatgctggcccattctttgagaccttttctccttctctgcctccctcaagatgagtgcccgggcatgagaagcacatggttccatgagcaggacccatctctcttctgtgaagatgcgttgggctgcaagtaacagaaatctcagtgaacagtggcctggcgtggtggctcatgcctgtaatgctcgcactttgggaggccagggtgggtggatcacttgaggtcaggagttcaagactagcctggccaacatggtgaaaccccatctcgactaaaaatacaaaaattagccaggcgtggtggtgcacacttgtaatcccagctactcgggaggctgaggcaagagaatcacttgaacccaggaggcggaggttgcagtgagccaagatggtgccgctgcactccagcctgggtgacacagcaagactccatctcaaaaaaaaaaaaagaaaaagaaatgaacgggttcaaagaccataatcatgcatatcacataagaccagaagtggcccaggtccagggtcagttaatttagcagctccacaaagtcatcagtcacctgagctccatccatcttcacatgctgtgctaccatttcttagctgtatcatcccatggtcccaaaagggctgctacacatccagccatcacatgcagataattcctttcaaaaacagcagaaagaggctcgttcttgtcttggtcccttttgaagaatgaatgaaaccttcctaagccttccagcaatttccccccaactccgatgggtaggaattgtcacatacccatgtgacccgataggaggcaaaagaaatgagacttctgggattagtttagcctcagattctgcagctgagaagttgatcagccacctctgaaggacatgcagcttgcagaaaattagggtggtgttaccaaggtgaaaaggggaaatggctttagagtagacaacagagatgccctgaggggttgtgtaggttgttcactgcaggaagtcccctggttaagaaggcaagtggggtttaaacagacccacagtctactcatcaaaccaggtgtccttggcattgtgtccacccagagagctcactgttttcttttctttttcttttctttttttttttttgagatggagtcttgctgcatcccccaggctggagtgcagtggcatgatcttggctcactgcagcctccgcctcccaggttcaggcgattctcctgcctcagcctcccgagtggctgggattgcaggtgcgtgccaccacgcccagctaattttgtacgtttagtggaaatggagtttcaccatgttggtcaggctggtctcaaactcctgacctcatgatccgccttcctcggcctcccaaggtgctgggattacaggtgttagccactgcgcccggccctagagctcactgttttctagttagtccatctggaagtggagcctttttccagtttgcacaaatgtgccatattggcttgtagctggcatgcatccaagtccataggtcctgcctcttcaatcctggctttctagggcctgggatgatcattgctagaactgagagaccagcctggctgagtgaacttcagggcgttccgttcattctttcagtaaatggttgcagcacatgttttacatgtcaggcagtgaaaccccccacagcagccttccctctcagaggatacatttgtaaccattacacagtcatcaaaggaataattttttttaatcaccagtgtgcatacagtcatggagctgggtattcccagctaccagggaggctgaggtgggaggattgcttgatgccaggagttagggaatatagtgcaccgtgattggacttgcgaatagccactgcactgcggcctggacgacgtagtgataccctgactcttataaataaataaatgaataaacacaattatgactttgcggatggg

SEQ ID NO: 3073 - DNA, 492 bp, Homo sapiens
  misc_feature (1)..(492): n=a,t,g or c
tgaaggagagacagagaactctgggttccgtcgtcctgtccacgtgctgtaccaagtgctggtgccagcctgttacctgttctcactgaaaagtctggctaatgctcttgtgtagtcacttctgattctgacaatcaatcaatcaatggcctagagcactgactgttaacacaaacgtcactagcaaagtagcaacagctttaagtctaaatacaaagctgttctgtgtgagaattttttaaaaggctacttgtataataacccttgtcatttttaatgtacaaaacgctattaagtggcttagaatttgaacatttgtgggtctttatttactttgcttcgtgtgtgggcaaagcaacatcttccctaaatatatattaccaaggaaaagcaagaaggcagattaggnttttgacaaaacaaacagggccaaaagggggcntgacccggggcngagccttggtgagggggcagggctgnggaggggcagtt

SEQ ID NO: 3074 - DNA, 286 bp, Homo sapiens
  misc_feature (1)..(286): n=a,t,g or c
gctctnagttanantctttattgactttagccaaggnagngccctgagatgggggtccagagagagaggcttggtggggctacgtcctgggggccaggttggttctgaggggtagaaggccatccacccattcgcacggctgctccaggagggcttgccacagctgcttctcctcaggtgtggaatccatccagggcacctgcagcccatagctgctgcctgggatntgggtnggcagggtttnagggcatgatcacactggacaccttggggcccccaaacacct

SEQ ID NO: 3075 - DNA, 481 bp, Homo sapiens
  misc_feature (1)..(481): n=a,t,g or c
ttttttttaatttttaaaatatttaatacatttttgttctacaaagaatgagcatttcttaaatattacaaacagtgaaacaaatatactagcttacagatatgtacaatttatgactttatacttcaaaaatgcaggaagataaattatatatttnatatacatgtaattttagatagaatgaacaattcaatattgctcttgtgttggtcttgctgcattgtatgcatgcccatggcttgtcgctggatggaggaggggctcatggggatagangggaagtcatggagccccatgctcatgcccagagcgccatcttcaaagncaatatttaattaaatattaacttattctgcctggggtcaaaaactgctatgcccatatgccaatgtagggtgtgttttcaagganccacagctaccatatttggggttgggaaacgtacaatgccttaaaaaatctattcngtggtactaactcc

SEQ ID NO: 3076 - DNA, 415 bp, Homo sapiens
  misc_feature (1)..(415): n=a,t,g or c
ntgantggaaggagtaaaactctttattcatagaacacatgactgttgatgtaatttacaaaaacaccatgagaactcacagtttagcaaggctgaaggatacaagttcaacatcaattgtatttctatttactagcaacaagtggttagaatttgaaattttaaaataccatttagcatcaaaactatgaaatgctgacatggtagacctgtacactgaaaactacaaaagattattaagagaaatagaagacaaaacattaatacctagggnagacagaccttgtttatagggccagaaggacttcaatattattaaggntggtcaattctcccaacagttttattataaattccaatggcaattctcaattcagggngccccacgggggttttttggtggtggtggttgtag

SEQ ID NO: 3077 - DNA, 195 bp, Homo sapiens; identical to SEQ ID NO: 1182
  misc_feature (1)..(195): n=a,t,g or c

SEQ ID NO: 3078 - DNA, 1537 bp, Homo sapiens
gctctcattaccttctgcccatcacttaataaatagccagccaattcatcaacattctggtacactgttggagagatgagacagtcacaccagctgcccctagtggggctcttactgttttcttttattccaagccaactatgcgagatttgtgaggtaagtgaagaaaactacatccgcctaaaacctctgttgaatacaatgatccagtcaaactataacaggggaaccagcgctgtcaatgttgtgttgtccctcaaacttgttggaatccagatccaaaccctgatgcaaaagatgatccaacaaatcaaatacaatgtgaaaagcagattgtcagatgtaagctcgggagagcttgccttgattatactggctttgggagtatgtcgtaacgctgaggaaaacttaatatatgattaccacctgactgacaagctagaaaataaattccaagcagaaattgaaaatatggaagcacacaatggcactcccctgactaactactaccagctcagcctggacgttttggccttgtgtctgttcaatgggaactactcaaccgccgaagttgtcaaccacttcactcctgaaaataaaaactattattttggtagccagttctcagtagatactggtgcaatggctgtcctggctctgacctgtgtgaagaagagtctaataaatgggcagatcaaagcagatgaaggcagtttaaagaacatcagtatttatacaaagtcactggtagaaaagattctgtctgagaaaaaagaaaatggtctcattggaaacacatttagcacaggagaagccatgcaggccctctttgtatcatcagactattataatgaaaatgactggaattgccaacaaactctgaatacagtgctcacggaaatttctcaaggagcattcagtaatccaaacgctgcagcccaggtcttacctgccctgatgggaaagaccttcttggatattaacaaagactcttcttgcgtctctgcttcaggtaacttcaacatctccgctgatgagcctataactgtgacacctcctgactcacaatcatatatctccgtcaattactctgtgagaatcaatgaaacatatttcaccaatgtcactgtgctaaatggttctgtcttcctcagtgtgatggagaaagcccagaaaatgaatgatactatatttggtttcacaatggaggagcgctcatgggggccctatatcacctgtattcagggcctatgtgccaacaataatgacagaacctactgggaacttctgagtggaggcgaaccactgagccaaggagctggtagttacgttgtccgcaatggagaaaacttggaggttcgctggagcaaatactaataagcccaaactttcctcagctgcataaaatccatttgcagtggagttccatgtttattgtccttatgccttcttcttcatttatcccagtacgagcaggagagttaataacctccccttctctctctacatgttcaataaaagttgttgaaagattaac

SEQ ID NO: 3079 - DNA, 2750 bp, Homo sapiens
tatcgaattccgggtggagggacctggcaaagcgccaggccccgcgtgggctcccggcgagcggttgatggcgagggggcgcggcgcgggctctgtagcccgagttcccgacgctggaggcccggcccgcctcagccgcattgtcccgggccgcgcgcaccggccctgagctgcgccgccgcagcacccgcccgccgcccgcggggccatgcggagagccgccgggatggaggacttggctccgcggaggaagaggagtcctggtacgaccagcaggacctggagcaggacttgcacctagctgcggagctggggaagactctgctggagaggaacaaggagctggaggggtccctgcagcagatgtactccaccaatgaggaacaggtgcaggagatcgagtacctaaccaagcagctggacacgctgcggcacgtgaacgagcagcacgccaaagtctatgagcagctggacctgacagcccgggacctggagctgaccaaccacaggctggtgctggagagtaaggctgcccagcagaagatccatgggctgacggagaccattgagcgcctccaggctcaggtggaggagctgcaggcccaggtggagcaactgagaggcctggaacagctgcgagtgctccgggagaagcgggaacgcaggcgtaccatccacaccttcccctgcctcaaggagctgtgcaccagcccccggtgcaaggatgctttccgcctacacagttcctccctggagctgcccgcggcccctggagcaggagaacgagcggctgcagaccctggtgggggcgctgcgctcccaggtgagccaggagcggcagcgcaaggagcgggcggagcgcgagtacaccgcggtgctgcaggagtactcggagctggagcgccagctgtgcgagatggaggcctgtcgcctgcgtgtgcaggagctggaggccgagctgctggagctgcagcagatgaagcaggccaagacctacctactgggtccggtacgaccacctggccgaggccctgctcgcacccctcacgcaggcccctgaggccgacgatccccagcccggccgcggggacgacttgggcgcccaggacggggtctcctcaccggcagcctctccaggccacgtggtgcgcaagagctgcagcgacactgcgctcaacgccatcgtggccaaagacccagccagccggcacgcgggcaacctcacactgcacgccaacagcgctgcgcaagcggggcatgtccatcctgcgggaggtggacgagcagtaccacgcgctgctggagaagtacgaggagctgctgagcaagtgccggcagcacggggccggagtgcgcgacgccggcgtgcagacctcgcgccccatctcccgggacagctcgtggagggacctgcgcgggggtgaggagggccagggtgaggtcaaggcaggagagaagagcctgagccagcacgtggaggccgtggacaagcggctggaacagagccagcccgagtacaaggcgctcttcaaagagatcttctccaggatccagaagaccaaggctgacatcaacgccaccaaagtcaagacgcacagcagcaagtgacccttctccggcctgcagcctcccccagggtggaagccgtggggtccctcaggcctgggcggtgcagcttccagagagcgagcgccctttagcggcctgccaccacagcacgcggcctcctgatccggaagcacgcagcatgttccctgctgagcggaggcagcccacctgtcctgcctcccaggagcccttggccacctcgcgccagcccaaaggcgcagctctgagttcaaagccaaatgtccccactaccccagggatcccccagctcccccagcccctggcttcctgaccctgcgcctcaccctcagactcctgaccaggcttctgaaagccattctggatcagttgggctttttttttttttggttaatttgtttttctaaaagatttgcaatcaaggtctccttgaccccttgccacactggaacgcttaaaggggaccccagggccagcgttaggggtcctggaccacccactgcttctccccaaccctgatgcgctgacttcccttagcaccagctgtcccacctccagggtcctgaccaggtcagagatgtcccctgccatgcgagcaggaagcctcagctgggcctggagtgtccctgctccagccctgccagggacggtttctccctggatacacttggcccaccgcagatctgtagccagtcagaggaggaggagaaggagcccctcagcagagtggtgcagtttcgctcagagcttgtctccttggcttccttccccagaaatgacctgctgggccttagctttccaggggccggggcagtggggagcccccatcccttcacaccgccaccaactaaaccaaagcttggcctctgactcccgtctctgtgcttgcccccatctcagggaccatgatgtctcagtcactccacgctccccacaggccaaccctggcacaggtcatgtctgcagcccccagaatcttctggacatgcaccaccagccggtggtcccaatgtccacccctgcctccccttcactggggactggggttttcgccccatgctgcatcgtcgttgtattgggatggggctgaggaacatgctccctcccataaaatgcctgctcttcacctcccacctttgtggggggcttttgaggacccagct

SEQ ID NO: 3080 - DNA, 1778 bp, Homo sapiens; identical to SEQ ID NO: 439

SEQ ID NO: 3081 - DNA, 892 bp, Homo sapiens
gcgcgccagtttcaggatgcagggtctaggagaggagccgcaatcgtgtctggggccccagccaggctggccggagctcctgtttccgctgctctgctgcctgcccggggtaccaacatggcccagaagcgtcctgcctgcaccctgaagcctgagtgtgtccagcagctgctggtttgctcccaggaggccaagaagtcagcctactgcccctacagtcactttcctgtgggggctgccctgctcacccaggaggggagaatcttcaaagggtgcaacatagaaaatgcctgctacccgctgggcatctgtgctgaacggaccgctatccagaaggccgtctcagaagggtacaaggatttcagggcaattgctatcgccagtgacatgcaagatgattttatctctccatgtggggcctgcaggcaagtcatgagagagtttggcaccaactggcccgtgtacatgaccaagccggatggtacgtatattgtcatgacggtccaggagctgctgccctcctcctttgggcctgaggacctgcagaagactcagtgacagccagagaatgcccactgcctgtaacagccacctggagaacttcataaagatgtctcacagccctggggacacctgcccagtggccccagcctacagggactgggcaaagatgatgtttccagattacactccagcctgagtcagcacccctcctagcaacctgccttgggacttagaacaccgccgcccccctgccccacctttcctttccttcctgtgggccctctttcaaagtccagcctagtctggactgcttccccatcagccttcccaaggttctatcctgttccgagcaacttttctaattataaacatcacagaacatcctgga

SEQ ID NO: 3082 - DNA, 13500 bp, Homo sapiens; identical to SEQ ID NO: 1212
  misc_feature (1)..(13500): n=a,t,g or c

SEQ ID NO: 3083 - DNA, 2974 bp, Homo sapiens
ctcagggcagagggaggaaggacagcagaccagacagtcacagcagccttgacaaaacgttcctggaactcaagctcttctccacagaggaggacagagcagacagcagagaccatggagtctccctcggcccctccccacagatggtgcatcccctggcagaggctcctgctcacagcctcacttctaaccttctggaacccgcccaccactgccaagctcactattgaatccacgccgttcaatgtcgcagaggggaaggaggtgcttctacttgtccacaatctgccccagcatctttttggctacagctggtacaaaggtgaaagagtggatggcaaccgtcaaattataggatatgtaataggaactcaacaagctaccccagggcccgcatacagtggtcgagagataatataccccaatgcatccctgctgatccagaacatcatccagaatgacacaggattctacaccctacacgtcataaagtcagatcttgtgaatgaagaagcaactggccagttccgggtatacccggagctgcccaagccctccatctccagcaacaactccaaacccgtggaggacaaggatgctgtggccttcacctgtgaacctgagactcaggacgcaacctacctgtggtgggtaaacaatcagagcctcccggtcagtcccaggctgcagctgtccaatggcaacaggaccctcactctattcaatgtcacaagaaatgacacagcaagctacaaatgtgaaacccagaacccagtgagtgccaggcgcagtgattcagtcatcctgaatgtcctctatggcccggatgcccccaccatttcccctctaaacacatcttacagatcaggggaaaatctgaacctctcctgccacgcagcctctaacccacctgcacagtactcttggtttgtcaatgggactttccagcaatccacccaagagctctttatccccaacatcactgtgaataatagtggatcctatacgtgccaagcccataactcagacactggcctcaataggaccacagtcacgacgatcacagtctatgcagagccacccaaacccttcatcaccagcaacaactccaaccccgtggaggatgaggatgctgtagccttaacctgtgaacctgagattcagaacacaacctacctgtggtgggtaaataatcagagcctcccggtcagtcccaggctgcagctgtccaatgacaacaggaccctcactctactcagtgtcacaaggaatgatgtaggaccctatgagtgtggaatccagaacgaattaagtgttgaccacagcgacccagtcatcctgaatgtcctctatggcccagacgaccccaccatttccccctcatacacctattaccgtccaggggtgaacctcagcctctcctgccatgcagcctctaacccacctgcacagtattcttggctgattgatgggaacatccagcaacacacacaagagctctttatctccaacatcactgagaagaacagcggactctatacctgccaggccaataactcagccagtggccacagcaggactacagtcaagacaatcacagtctctgcggagctgcccaagccctccatctccagcaacaactccaaacccgtggaggacaaggatgctgtggccttcacctgtgaacctgaggctcagaacacaacctacctgtggtgggtaaatggtcagagcctcccagtcagtcccaggctgcagctgtccaatggcaacaggaccctcactctattcaatgtcacaagaaatgacgcaagagcctatgtatgtggaatccagaactcagtgagtgcaaaccgcagtgacccagtcaccctggatgtcctctatgggccggacacccccatcatttcccccccagactcgtcttacctttcgggagcgaacctcaacctctcctgccactcggcctctaacccatccccgcagtattcttggcgtatcaatgggataccgcagcaacacacacaagttctctttatcgccaaaatcacgccaaataataacgggacctatgcctgttttgtctctaacttggctactggccgcaataattccatagtcaagagcatcacagtctctgcatctggaacttctcctggtctctcagctggggccactgtcggcatcatgattggagtgctggttggggttgctctgatatagcagccctggtgtagtttcttcatttcaggaagactgacagttgttttgcttcttccttaaagcatttgcaacagctacagtctaaaattgcttctttaccaaggatatttacagaaaagactctgaccagagatcgagaccatcctagccaacatcgtgaaaccccatctctactaaaaatacaaaaatgagctgggcttggtggcgcgcacctgtagtcccagttactcgggaggctgaggcaggagaatcgcttgaacccgggaggtggagattgcagtgagcccagatcgcaccactgcactccagtctggcaacagagcaagactccatctcaaaaagaaaagaaaagaagactctgacctgtactcttgaatacaagtttctgataccactgcactgtctgagaatttccaaaactttaatgaactaactgacagcttcatgaaactgtccaccaagatcaagcagagaaaataattaatttcatgggactaaatgaactaatgaggattgctgattctttaaatgtcttgtttcccagatttcaggaaactttttttcttttaagctatccactcttacagcaatttgataaaatatacttttgtgaacaaaaattgagacatttacattttctccctatgtggtcgctccagacttgggaaactattcatgaatatttatattgtatggtaatatagttattgcacaagttcaataaaaatctgctctttgtataacagaaaaa

SEQ ID NO: 3084 - DNA, 2218 bp, Homo sapiens
cttctctctccattcagtgcacgcgttactttggctaaaaggaggtgagcggcactctgcccttccagagcaagcatggagcaacaggatcagagcatgaaggaagggaggctgacgcttgtgcttgccctggcaaccctgatagctgcctttgggtcatccttccagtatgggtacaacgtggctgctgtcaactccccagcactgctcatgcaacaattttacaatgagacttactatggtaggaccggtgaattcatggaagacttccccttgacgttgctgtggtctgtaaccgtgtccatgtttccatttggagggtttatcggatccctcctggtcggccccttggtgaataaatttggcagaaaaggggccttgctgttcaacaacatattttctatcgtgcctgcgatcttaatgggatgcagcagagtcgccacatcatttgagcttatcattatttccagacttttggtgggaatatgtgcaggtgtatcttccaacgtggtccccatgtacttaggggagctggcccctaaaaacctgcggggggctctcggggtggtgccccagctcttcatcactgttggcatccttgtggcccagatctttggtcttcggaatctccttgcaaacgtagatggctggccgatcctgctggggctgaccggggtccccgcggcgctgcagctccttctgctgcccttcttccccgagagccccaggtacctgctgattcagaagaaagacgaagcggccgccaagaaagccctacagacgctgcgcggctgggactctgtggacagggaggtggccgagatccggcaggaggatgaggcagagaaggccgcgggcttcatctccgtgctgaagctgttccggatgcgctcgctgcgctggcagctgctgtccatcatcgtcctcatgggcggccagcagctgtcgggcgtcaacgctatctactactacgcggaccagatctacctgagcgccggcgtgccggaggagcacgtgcagtacgtgacggccggcaccggggccgtgaacgtggtcatgaccttctgcgccgtgttcgtggtggagctcctgggtcggaggctgctgctgctgctgggcttctccatctgcctcatagcctgctgcgtgctcactgcagctctggcactgcaggacacagtgtcctggatgccatacatcagcatcgtctgtgtcatctcctacgtcataggacatgccctcgggcccagtcccatacccgcgctgctcatcactgagatcttcctgcagtcctctcggccatctgccttcatggtggggggcagtgtgcactggctctccaacttcaccgtgggcttgatcttcccgttcatccaggagggcctcggcccgtacagcttcattgtcttcgccgtgatctgcctcctcaccaccatctacatcttcttgattgtcccggagaccaaggccaagacgttcatagagatcaaccagattttcaccaagatgaataaggtgtctgaagtgtacccggaaaaggaggaactgaaagagcttccacctgtcacttcggaacagtgactctggagaggaagccagtggagctggtctgccaggggcttcccactttggcttatttttctgacttctagctgtctgtgaatatccagaaataaaacaactctgatgtggaatgcagtcctcatctccagcctccccaccccagtgggaactgtgcaaagggctgccttgctgttcttgaagctgggctgtctctctccatgttggcctgtcaccagacccgagtcaattaaacagctggtcctccactttgctggttcagccttcgtgtggctcctggtaacgtggctccaccttgatgggtcaacctttgtgtggctcctggtaacataacaacaacagttactatagtggtgagatggaaggaatcaaattttgccagagaaactaactcggtggccccaacaggtcttccggggccatgggcatttgtttagagccaaattcatcctcttaccagatccttttccagaaatacctgtctaggaaggtgtgatgtcagaaacaatgacatccagaaagctgaggaacaggttcctgtggagacactgagtcagaattcttcatccaaattattttgttagtggaaaatggaattgcttctgtgtagtcaataaaatgaacctgatcacttttc

SEQ ID NO: 3085 - DNA, 871 bp, Homo sapiens
gctgtcagaaaacaataacagcagtgagaatgaacgcacttaaataaaagctcgtgtctagagtctctccttttataggcctttcatgcaaataaagaattcaaaatatccagctctgattgggcaatgtgttagtgacgcatacatgtaaaatagccttcaccttatttcctttctaattggttggctcgtcaaagaacaattttaaccaatcaaattgcgcctttcacaattctaccgatgactataactagcttcttattcctccatcgagcccattctttttctttattcagtggattgttagttcttctgctgttaggaagccactatgtctggacgtggaaagcaaggcggcaaagctcgggcaaaagctaaaacgcgttcttccagggccggtcttcagtttccagttggccgtgtgcaccgcctcctccgcaaaggcaactactccgaacgagtcggggccggcgctccagtgtacctggcagcggtgctggaatatctgacggccgagatcttagagctagctggcaacgcggctcgcgacaataagaagacccgcatcatcccgcgccacctgcagctagccatccgcaacgacgaggagctaaataagcttctaggtcgcgtgaccatcgcgcagggcggtgtcctgcccaacatccaggccgtattgctgcctaagaagacggagagccaccataaggccaagggcaagtgaaatgattactagtcaaatccgtcagtgatcccgagtcccagaaaccaaaggctcttttcagagccacccaccttttctgtaaagtgctggaatacacatacgatgcctgaaatctcaatgttcactgtcctaatttttaacgaactt

SEQ ID NO: 3086 - DNA, 451 bp, Homo sapiens
tgtgctcactgaggatctgaggggaccctgttaggagagcatagcatcatgatgtattagctgttcatctgctactggttggatggacataactattgtaactattcagtatttactggtaggcactgtcctctgattaaacttggcctactggaatggctacttaggattgatctaagggccaaagtgcagggtgggtgaactttattgtactttggatttggttaacctgttttcttcaagcctgaggttttatatacaaactccctgaatactctttttgccttgtatcttctcagcctcctagccaagtcctatgtaatatggaaaacaaacactgcagacttgagattcagttgccgatcaaggctctggcattcagagaacccttgcaactcgagaagctgtttttatttccgtttttgttttgatcccagtgctctcccatctt

SEQ ID NO: 3087 - DNA, 354 bp, Homo sapiens
  misc_feature (1)..(354): n=a,t,g or c
tttttggccttcaggtttccatttaatggccaagccagcactgccaagatgtcctcctgcctgagaagcccacccacgctggcacccctcagcctcactagcggcatcccagtccagtcctggtgtggggcctcatctcagctccttcagcaagctgttgacagagcccagcagctcctggaagtagccctcgtcctcaccatcctgcagctccaggctggccagcacctggtactcagcctgcaggtggccagtgtcctgccgagctgggggtcctgacggtagcggtcccggcagtggtcaggaggacgcccagtgtctgcagcaccttctnacgggcatcatgctcgcttg

SEQ ID NO: 3088 - DNA, 444 bp, Homo sapiens
ttaacatgcacaacctgccacttttaatcagaagtccatgtatgaaatccaggctggttttggatgttaacatggagcgaatgggatacatcaaagaatggttggctgcttgttttaaagaggtcccactggtgacaggatggtagtggcgatggcagtgaggacagactggtaaagggaaaacccagaggcttgtggggagaaagggcttttgtagttaggaagagacagaggtaggcccctcagccagctccagcaggatagagacaacaacatacagcgcacagagaattcgtgcctcagggtcatagtccatgtcaggaggactgctggccagctcatcccagttctgctccatgacagatttcacctggtccttcaacagaggaagggtccccttctccaggggcctcagccacaaactgctgctcttcagacagctct

SEQ ID NO: 3089 - DNA, 481 bp, Homo sapiens
  misc_feature (1)..(481): n=a,t,g or c
cacaagaattatgtctttattggttcatcttagaattaaatcaacatggaatatgtactttttgaattaaacaaaatgttttgataaaaatgagatacgtgtgtataaaagctggaaaactcatgtcccctgaaacttggtttccaccagatgagtttcaaattcagatactaaacacacatgaagaaataatcaaatgaattctattcatcctttccccaaagttttgcttacaattaagatataggtattatttgtatgccgaacaaacaaaataaattggaagatgtttggataaacagggaagtgaacacttcaggaactactatttgcagtttgcaggacaggataatcttctctaggaagaataatgtcaacatagcagcactatattcaccaggattccccagagccgatggtccgatcatgtgggcaggaagccaaaccttctgggctgctccacaatatccatcagcttncc

SEQ ID NO: 3090 - DNA, 424 bp, Homo sapiens
taaagactgaattctttatttggaatgaaatattcttgtcttacacagtagataataaaaaggaataacgtatacacattattaatcataaatgaaaagagaaaaccagtgcaaaatgcggcagacagtacatctctaacatattgcaaaggctgataccgggacaacactacttcagaaaggtgccagcaaaatggtgaatgtgtgaaaacaaagaaaaatattgtgtttatagggtgcagaaagtttcccagaaactgacagagcccatgcatctctgcacccagaatacacttagagaataattttaaccatgacaataggggactacagaaaatggtatattgtgtataaacctggcctctctaatcgcctccttatgtgcctggaacatcttgacgttgttcatgttcgactggccaat

SEQ ID NO: 3091 - DNA, 427 bp, Homo sapiens; identical to SEQ ID NO: 470

SEQ ID NO: 3092 - DNA, 420 bp, Homo sapiens
  misc_feature (1)..(420): n=a,t,g or c
gtcataaagattgagtttatttttatcctcaattttaataaattctgttctgggttttagttcagattatgagtatatattatcataaatggtttgaatatttaccaacacagaatttagtaacaagtgagatagatgctaagacactgttaaggtaggttggaagcacttagttttgataggcatgatatatagctagggaagcaagtgtatgcaaataattatgctgtctttgaaagagtggcttatttagatgtagcatagccaatgagactgtgggtagtacttgtgaaacttacaggaaggtaattaaagacggcacagattctcttcttttactgggctgtttctggcattacataggggattatggaaggggagacaagaggattgacnggggagccnggaacngcccgtcac

SEQ ID NO: 3093 - DNA, 437 bp, Homo sapiens
  misc_feature (1)..(437): n=a,t,g or c
aagtttaaaaattaagaacaaatactttgatagatttcttttataactccttaatccatctagtagtttgcaagtcatgaactgacaatcttcgttcacctcaagtaattagatcttgtggtaccatttatatttcctttttataactatagataacaaattatataaagntgtgaacattcttcccttatcacctccccctctcccaccccaatcctagggngtatcctgaggtgaggcatgtatgccttcaaatcttttcatgtacattcacataaaatgtaactttaaaggnctcaatgtggtatattatacacatggggtatgtggaatatatnggcatggcatttatttaatttggttttggnccaggggggggggtcccntacctgctttgggaccctggcctttggntcaccttcnctagggggttcttt

SEQ ID NO: 3094 - DNA, 441 bp, Homo sapiens; identical to SEQ ID NO: 1164

SEQ ID NO: 3095 - DNA, 341 bp, Homo sapiens
  misc_feature (1)..(341): n=a,t,g or c
gcagttgggaagaatttattatcactaagtggccctgacagatcagggaggagggggtgacactaacgaggctgctacaatcagctcccctagaggcagcgattaagggctcattacccgctggggtgaggggagcctgggaaaggcagcggggcgnggggattaggttaggaggtggggcantttagagggaagaagagtgggacacccccaggggagtccaaggaggcctggcctggnagaagantnagnttaccctcccaccccccantggggannntatgactaaggaagcccccagaagggntgaaaggagantttcccagggaantgagnttaga

SEQ ID NO: 3096 - DNA, 328 bp, Homo sapiens; identical to SEQ ID NO: 485
  misc_feature (1)..(328): n=a,t,g or c

SEQ ID NO: 3097 - DNA, 203 bp, Homo sapiens
cttgtctttgagttttattaggaaggggagtccgtcgtggtgtgagacgttagaccggaaggctgggcttgctaaataaaatccgcggtctggcacctctggagagggcagagcctcctcagaagagctggcctgaggaagaagccctttgccccctccccttctataagttagtgtcatttggctctgggaacgctggggcc

SEQ ID NO: 3098 - DNA, 299 bp, Homo sapiens
  misc_feature (1)..(299): n=a,t,g or c
tttccaggttgacaggttttattccacccccttccatccccatggccaccccaggcaggaggagacaggtgtgctggagtctggtcactttggggcccggcgtgggcagagcccactgggtttacattctctgtgggcaggtgtggacaccagagggctggggcaggaggagcgtgggagcgagcggncgacccccgtctctggcccggcccctgggtaaacgccgactcagatgcctgaaacagacctgggccgagcaaggaaggttgatggtatttccacccagacagaaattcaaa

SEQ ID NO: 3099 - DNA, 216 bp, Homo sapiens
ggaaaacaaaagaaccagccattttattccaagacctatgttctggggcagcaggaataaataaggaagggaggggacgggggcagggaggtaggttctacgtcttgcagcacatcccacactttgatcgatgacagcagccgcagcagaaaatgcagatggggaagtgggtgtctcgcctccttcgcctctggaacatgggcatccagctggccc

SEQ ID NO: 3100 - DNA, 364 bp, Homo sapiens
  misc_feature (1)..(364): n=a,t,g or c
ttgtactttcatttagaagnatgaatcatgagcaagtagtcatgcaggaaattgtatcctctgcccacccacccacagaaagggccagtgctggaatggacagaatacagcaggaagtgcatgaaggtggaaaaggggagggagctgggagcttatctccgagagcgtttgggaggataggcgcgtggagtctgttagctggaggcttctacattcctggggcctccagaacccaaacgcctgccagctgccctgcccagtgaaacccaaaccaggttgcctttttgaacttttccacttgagggccacctttgggagtcagagccagcgagctcagggtctctcctgggggaaccctttcaaa

SEQ ID NO: 3101 - DNA, 3127 bp, Homo sapiens
gtttgcatagctccctggacttctgctttgcactgccctgcaggagtgggtggggaaaggaagtggctttgaggcacacagaggggcttgttgaggccaccggaggaagcttctgccaccaatatgggacctgtgcccagcctaccagaagagagcatctgaaaacatgtatcgacatggtaacccctctgcttgaagcctcacatggctccctattgccttggtgctgaacaccctatggctgaccgtggcccagcctctgcaacagctctgcctcctctccagtggtgaagacccagcctgctgagactcctcctgcagttcctcaacatgcctgcatttctgctgccgtcagggcctttgcgaaggttgttccttgtaactggaatgcccttccatccctttttttattcaaaaggctgcaattttaattgaagaaagttcccttccaaggttcatgagttgcctgacttgcccaccggtttcctgcaagatcccttggcctggcacttagtgctcaggaaatatttggtgatgggccaactgagtgagaaggtgggatctggtgggaaggaaaggcggaaggtagaaattctgctcacttcctcattcccacctcccaaggaacccctggtgtccctgtggaacccgctttgggaaccggtggttcaggtcagccttttcactttgtactcaaagccacatcgcattgaagccacaggtggggcaaggtcatgcatgactgagtctccaaatcccttcaccctgtttggttctgcaacggggattaggggagccccacgatttgttttcaaaggatgtccgggctccaggacaggatgccctgggtcacctgatgacaggtgtggtggttggaaagggccgggtttcagctccgggtacacttcctccttccttctgctgcgtggtgtggcctcttccacgtcctcagaatccagctgttactcgtccgcggcctctcagctctagggccctctgcacactggcccccccagtgtcacgggcatccagacgggatccagtgcatcctcttttagaagaaaggcctgtctccaggtccccgagtccctctagcatctcccagaaggtgtcaagacgcagcagtgtccaggagcggcagagactctgacccatggatcccctgggcccggccaagccacagtggtcgtggcgctgctgtctgaccacgctgctgtttcagctgctgatggctgtgtgtttcttctcctatctgcgtgtgtctcaagacgatcccactgtgtaccctaatgggtcccgcttcccagacagcacagggacccccgcccactccatccccctgatcctgctgtggacgtggccttttaacaaacccatagctctgccccgctgctcagagatggtgcctggcacggctgactgcaacatcactgccgaccgcaaggtgtatccacaggcagacgcggtcatcgtgcaccaccgagaggtcatgtacaaccccagtgcccagctcccacgctccccgaggcggcaggggcagcgatggatctggttcagcatggagtccccaagccactgctggcagctgaaagccatggacggatacttcaatctcaccatgtcctaccgcagcgactccgacatcttcacgccctacggctggctggagccgtggtccggccagcctgcccacccaccgctcaacctctcggccaagaccgagctggtggcctgggcagtgtccaactgggggccaaactccgccagggtgcgctactaccagagcctgcaggcccatctcaaggtggacgtgtacggacgctcccacaagcccctgccccagggaaccatgatggagacgctgtcccggtacaagttctatctggccttcgagaactccttgcaccccgactacatcaccgagaagctgtggaggaacgccctggaggcctgggccgtgcccgtggtgctgggccccagcagaagcaactacgagaggttcctgccacccgacgccttcatccacgtggacgacttccagagccccaaggacctggcccggtacctgcaggagctggacaaggaccacgcccgctacctgagctactttcgctggcgggagacgctgcggcctcgctccttcagctgggcactcgctttctgcaaggcctgctggaaactgcaggaggaatccaggtaccagacacgcggcatagcggcttggttcacctgagaggctggtgtggggcctgggctgccaggaacctcattttcctggggcctcacctgagtgggggcctcatctacctaaggactcgtttgcctgaagcttcacctgcctgaggactcacctgcctgggacggtcacctgttgcagcttcacctgcctggggattcacctacctgggtcctcactttcctggggcctcacctgctggagtcttcggtggccaggtatgtcccttacctgggatttcacatgctggcttccaggagcgtcccctgcggaagcctggcctgctggggatgtctcctggggactttgcctactggggacctcggctgttggggactttacctgctgggacctgctcccagagaccttccacactgaatctcacctgctaggagcctcacctgctggggacctcaccctggaggcactgggccctgggaactggcacccatgggcccacccatgagtgatggttctggctgatttgtttgtgatgttgttagccgcctgtgaggggtgcagagagataatcaccgcaccgtttccagatgtaatactgcaaagaaaaccaatgatgaggccgggtgcggtggctcacacctgtaatcccagcactttgggaggccgaggcaggcggatcacaaggtcaggagatcgagaccatcctggccaatatggtgaaacccgtctctattaaaaaatacaaaaattagtggggcgtggtctcaggctcctgcagtcccagctacttgggaggctgaggcaggagaatggtgtgaacctgtgaggtggagcttgcagtgagccaagatcgcgccattgcactccaacctggacgacagagcaagactccatctcaaaaaaataaaataaaggccatatgtttaatca

SEQ ID NO: 3102 - DNA, 1362 bp, Homo sapiens
agcaactccaaggacacagttcacagaaatttggttctcagccccaaaatactgattgaattggagacaattacaaggactctctggccaaaaacccttgaagaggccccgtgaaggaggcagtgaggagcttttgattgctgacctgtgtcgtaccaccccagaatgtgcactgggggctgtgccagatgcctgggggggaccctcattccccttgctttttttggcttcctggctaacatcctgttattttttcctggaggaaaagtgatagatgacaacgaccacctttcccaagagatctggtttttcggaggaatattaggaagcggtgtcttgatgatcttccctgcgctggtgttcttgggcctgaagaacaatgactgctgtgggtgctgcggcaacgagggctgtgggaagcgatttgcgatgttcacctccacgatatttgctgtggttggattcttgggagctggatactcgtttatcatctcagccatttcaatcaacaagggtcctaaatgcctcatggccaatagtacatggggctaccccttccacgacggggattatctcaatgatgaggccttatggaacaagtgccgagagcctctcaatgtggttccctggaatctgaccctcttctccatcctgctggtcgtaggaggaatccagatggttctctgcgccatccaggtggtcaatggcctcctggggaccctctgtggggactgccagtgttgtggctgctgtgggggagatggacccgtttaaacctccgagatgagctgctcagactctacagcatgacgactacaatttcttttcataaaacttcttctcttcttggaattattaattcctatctgcttcctagctgataaagcttagaaaaggcagttattccttctttccaaccagctttgctcgagttagaattttgttattttcaaataaaaaatagtttggccacttaacaaatttgatttataaatctttcaaattagttcctttttagaatttaccaacaggttcaaagcatacttttcatgatttttttattacaaatgtaaaatgtataaagtcacatgtactgccatactacttctttgtatataaagatgtttatatctttggaagttttacataaatcaaaggaagaaagcacatttaaaatgagaaactaagaccaatttctgtttttaagaggaaaaagaatgattgatgtatcctaagtattgttatttgttgtctttttttgctgccttgcttgagttgcttgtgactgatcttttgaggctgtcatcatggctagggttcttttatgtatgttaaattaaaacctgaattcagaggtaacgt

SEQ ID NO: 3103 - DNA, 2516 bp, Homo sapiens
aattcgggccgaaaagaagacagccttgggtcgcgattgtggggcttcgaagagtccagcagtgggaatttctagaatttggaatcgagtgcattttctgacatttgagtacagtacccaggggttcttggagaagaacctggtcccagaggagcttgactgaccataaaaatgagtactgcagatgcacttgatgatgaaaacacatttaaaatattagttgcaacagatattcatcttggatttatggagaaagatgcagccagaggaaatgatacgtttgtaacactcgatgaaattttaagacttgcccaggaaaatgaagtggattttattttgttaggtggtgatctttttcatgaaaataagccctcaaggaaaacattacatacctgcctcgagttattaagaaaatattgtatgggtgatcggcctgtccagtttgaaattctcagtgatcagtcagtcaactttggttttagtaagtttccatgggtgaactatcaagatggcaacctcaacatttcaattccagtgtttagtattcatggcaatcatgacgatcccacaggggcagatgcactttgtgccttggacattttaagttgtgctggatttgtaaatcactttggacgttcaatgtctgtggagaagatagacattagtccggttttgcttcaaaaaggaagcacaaagattgcgctatatggtttaggatccattccagatgaaaggctctatcgaatgtttgtcaataaaaaagtaacaatgttgagaccaaaggaagatgagaactcttggtttaacttatttgtgattcatcagaacaggagtaaacatggaagtactaacttcattccagaacaatttttggatgacttcattgatcttgttatctggggccatgaacatgagtgtaaaatagctccaaccaaaaatgaacaacagctgttttatatctcacaacctggaagctcagtggttacttctctttccccaggagaagctgtaaagaaacatgttggtttgctgcgtattaaagggaggaagatgaatatgcataaaattcctcttcacacagtgcggcagtttttcatggaggatattgttctagctaatcatccagacatttttaacccagataatcctaaagtaacccaagccatacaaagcttctgtttggagaagattgaagaaatgcttgaaaatgctgaacgggaacgtctgggtaattctcaccagccagagaagcctcttgtacgactgcgagtggactatagtggaggttttgaacctttcagtgttcttcgctttagccagaaatttgtggatcgggtagctaatccaaaagacattatccattttttcaggcatagagaacaaaaggaaaaaacaggagaagagatcaactttgggaaacttatcacaaagccttcagaaggaacaactttaagggtagaagatcttgtaaaacagtactttcaaaccgcagagaagaatgtgcagctctcactgctaacagaaagagggatgggtgaagcagtacaagaatttgtggacaaggaggagaaagatgccattgaggaattagtgaaataccagttggaaaaaacacagcgatttcttaaagaacgtcatattgatgccctcgaagacaaaatcgatgaggaggtacgtcgtttcagagaaaccagacaaaaaaatactaatgaagaagatgatgaagtccgtgaggctatgaccagggccagagcactcagatctcagtcagaggagtctgcttctgcctttagtgctgatgaccttatgagtatagatttagcagaacagatggctaatgactctgatgatagcatctcagcagcaaccaacaaaggaagaggccgaggaagaggtcgaagaggtggaagagggcagaattcagcatcgagaggagggtctcaaagaggaagagcctttaaatctacaagacagcagccttcccgaaatgtcactactaagaattattcagaggtgattgaggtagatgaatcagatgtggaagaagacatttttcctaccacttcaaagacagatcaaaggtggtccagcacatcatccagcaaaatcatgtcccagagtcaagtatcgaaaggggttgattttgaatcaagtgaggatgatgatgatgatccttttatgaacactagttctttaagaagaaatagaagataatatatttactggcactgagaaacatgcaagatacaggaaaaatgaaaatgttacaagctaagagtttacagtttaagattttaagtattgtttcctgagcataactccataagtaagaaatttctagttcacagacatacaatagcattgattcaccttgtttttttaacctggttgttgtagtaagagctttgtttcaatatcactcttgagtaaagattaaaataaagctaccattttacatttctaaaaaaaaaaaaaaaaaaaaaaaaaaaaaaaaaaaaaaaaaaaaaaaaaaaaaa

SEQ ID NO: 3104 - DNA, 2740 bp, Homo sapiens
gcgaaattgaggtttcttggtattgcgcgtttctcttccttgctgactctccgaatggccatggactcgtcgcttcaggcccgcctgtttcccggtctcgctatcaagatccaacgcagtaatggtttaattcacagtgccaatgtaaggactgtgaacttggagaaatcctgtgtttcagtggaatgggcagaaggaggtgccacaaagggcaaagagattgattttgatgatgtggctgcaataaacccagaactcttacagcttcttcccttacatccgaaggacaatctgcccttgcaggaaaatgtaacaatccagaaacaaaaacggagatccgtcaactccaaaattcctgctccaaaagaaagtcttcgaagccgctccactcgcatgtccactgtctcagagcttcgcatcacggctcaggagaatgacatggaggtggagctgcctgcagctgcaaactcccgcaagcagttttcagttcctcctgcccccactaggccttcctgccctgcagtggctgaaataccattgaggatggtcagcgaggagatggaagagcaagtccattccatccgtggcagctcttctgcaaaccctgtgaactcagttcggaggaaatcatgtcttgtgaaggaagtggaaaaaatgaagaacaagcgagaagagaagaaggcccagaactctgaaatgagaatgaagagagctcaggagtatgacagtagttttccaaactgggaatttgcccgaatgattaaagaatttcgggctactttggaatgtcatccacttactatgactgatcctatcgaagagcacagaatatgtgtctgtgttaggaaacgcccactgaataagcaagaattggccaagaaagaaattgatgtgatttccattcctagcaagtgtctcctcttggtacatgaacccaagttgaaagtggacttaacaaagtatctggagaaccaagcattctgctttgactttgcatttgatgaaacagcttcgaatgaagttgtctacaggttcacagcaaggccactggtacagacaatctttgaaggtggaaaagcaacttgttttgcatatggccagacaggaagtggcaagacacatactatgggcggagacctctctgggaaagcccagaatgcatccaaagggatctatgccatggcctcccgggacgtcttcctcctgaagaatcaaccctgctaccggaagttgggcctggaagtctatgtgacattcttcgagatctacaatgggaagctgtttgacctgctcaacaagaaggccaagctgcgcgtgctggaggacggcaagcaacaggtgcaagtggtggggctgcaggagcatctggttaactctgctgatgatgtcatcaagatgctcgacatgggcagcgcctgcagaacctctgggcagacatttgccaactccaattcctcccgctcccacgcgtgcttccaaattattcttcgagctaaagggagaatgcatggcaagttctctttggtagatctggcagggaatgagcgaggcgcagacacttccagtgctgaccggcagacccgcatggagggcgcagaaatcaacaagagtctcttagccctgaaggagtgcatcagggccctgggacagaacaaggctcacaccccgttccgtgagagcaagctgacacaggtgctgagggactccttcattggggagaactctaggacttgcatgattgccacgatctcaccaggcataagctcctgtgaatatactttaaacaccctgagatatgcagacagggtcaaggagctgagcccccacagtgggcccagtggagagcagttgattcaaatggaaacagaagagatggaagcctgctctaacggggcgctgattccaggcaatttatccaaggaagaggaggaactgtcttcccagatgtccagctttaacgaagccatgactcagatcagggagctggaggagaaggctatggaagagctcaaggagatcatacagcaaggaccagactggcttgagctctctgagatgaccgagcagccagactatgacctggagacctttgtgaacaaagcggaatctgctctggcccagcaagccaagcatttctcagccctgcgagatgtcatcaaggccttacgcctggccatgcagctggaagagcaggctagcagacaaataagcagcaagaaacggccccagtgacgactgcaaataaaaatctgtttggtttgacacccagcctcttccctggccctccccagagaactttgggtacctggtgggtctaggcagggtctgagctgggacaggttctggtaaatgccaagtatgggggcatctgggcccagggcagctggggagggggtcagagtgacatgggacactccttttctgttcctcagttgtcgccctcacgagaggaaggagctcttagttacccttttgtgttgcccttctttccatcaaggggaatgttctcagcatagagctttctccgcagcatcctgcctgcgtggactggctgctaatggagagctccctggggttgtcctggctctggggagagagacggagcctttagtacagctatctgctggctctaaaccttctacgcctttgggccgagcactgaatgtcttgtactttaaaaaaatgtttctgagacctctttctactttactgtctccctagagtcctagaggatccctac

SEQ ID NO: 3105 - DNA, 3492 bp, Homo sapiens
ggttggaggagcccggagcccgccttcggagctacggcctaacggcggcggcgactgcagtctggagggtccacacttgtgattctcaatggagagtgaaaacgcagattcataatgaaaactagcccccgtcggccactgattctcaaaagacggaggctgccccttcctgttcaaaatgccccaagtgaaacatcagaggaggaacctaagagatcccctgcccaacaggagtctaatcaagcagaggcctccaaggaagtggcagagtccaactcttgcaagtttccagctgggatcaagattattaaccaccccaccatgcccaacacgcaagtagtggccatccccaacaatgctaatattcacagcatcatcacagcactgactgccaagggaaaagagagtggcagtagtgggcccaacaaattcatcctcatcagctgtgggggagccccaactcagcctccaggactccggcctcaaacccaaaccagctatgatgccaaaaggacagaagtgaccctggagaccttgggaccaaaacctgcagctagggatgtgaatcttcctagaccacctggagccctttgcgagcagaaacgggagacctgtgcagatggtgaggcagcaggctgcactatcaacaatagcctatccaacatccagtggcttcgaaagatgagttctgatggactgggctcccgcagcatcaagcaagagatggaggaaaaggagaattgtcacctggagcagcgacaggttaaggttgaggagccttcgagaccatcagcgtcctggcagaactctgtgtctgagcggccaccctactcttacatggccatgatacaattcgccatcaacagcactgagaggaagcgcatgactttgaaagacatctatacgtggattgaggaccactttccctactttaagcacattgccaagccaggctggaagaactccatccgccacaacctttccctgcacgacatgtttgtccgggagacgtctgccaatggcaaggtctccttctggaccattcaccccagtgccaaccgctacttgacattggaccaggtgtttaagccactggacccagggtctccacaattgcccgagcacttggaatcacagcagaaacgaccgaatccagagctccgccggaacatgaccatcaaaaccgaactccccctgggcgcacggcggaagatgaagccactgctaccacgggtcagctcatacctggtacctatccagttcccggtgaaccagtcactggtgttgcagccctcggtgaaggtgccattgcccctggcggcttccctcatgagctcagagcttgcccgccatagcaagcgagtccgcattgcccccaaggtttttggggaacaggtggtgtttggttacatgagtaagttctttagtggcgatctgcgagattttggtacacccatcaccagcttgtttaattttatctttctttgtttatcagtgctgctagctgaggaggggatagctcctctttcttctgcaggaccagggaaagaggagaaactcctgtttggagaagggttttctcctttgcttccagttcagactatcaaggaggaagaaatccagcctggggaggaaatgccacacttagcgagacccatcaaagtggagagccctcccttggaagagtggccctccccggccccatctttcaaagaggaatcatctcactcctgggaggattcgtcccaatctcccaccccaagacccaagaagtcctacagtgggcttaggtccccaacccggtgtgtctcggaaatgcttgtgattcaacacagggagaggagggagaggagccggtctcggaggaaacagcatctactgcctccctgtgtggatgagccggagctgctcttctcagaggggcccagtacttcccgctgggccgcagagctcccgttcccagcagactcctctgaccctgcctcccagctcagctactcccaggaagtgggaggaccttttaagacacccattaaggaaacgctgcccatctcctccaccccgagcaaatctgtcctccccagaacccctgaatcctggaggctcacgcccccagccaaagtagggggactggatttcagcccagtacaaacctcccagggtgcctctgaccccttgcctgaccccctggggctgatggatctcagcaccactcccttgcaaagtgctcccccccttgaatcaccgcaaaggctcctcagttcagaacccttagacctcatctccgtcccctttggcaactcttctccctcagatatagacgtccccaagccaggctccccggagccacaggtttctggccttgcagccaatcgttctctgacagaaggcctggtcctggacacaatgaatgacagcctcagcaagatcctgctggacatcagctttcctggcctggacgaggacccactgggccctgacaacatcaactggtcccagtttattcctgagctacagtagagccctgcccttgcccctgtgctcaagctgtccaccatcccgggcactccaaggctcagtgcaccccaagcctctgagtgaggacagcaggcagggactgttctgctcctcatagctccctgctgcctgattatgcaaaagtagcagtcacaccctagccactgctgggaccttgtgttccccaagagtatctgattcctctgctgtccctgccaggagctgaagggtgggaacaacaaaggcaatggtgaaaagagattaggaaccccccagcctgtttccattctctgcccagcagtctcttaccttccctgatctttgcagggtggtccgtgtaaatagtataaattctccaaattatcctctaattataaatgtaagcttatttccttagatcattatccagagactgccagaaggtgggtaggatgacctggggtttcaattgacttctgttccttgcttttagttttgatagaagggaagacctgcagtgcacggtttcttccaggctgaggtacctggatcttgggttcttcactgcagggacccagacaagtggatctgcttgccagagtcctttttgcccctccctgccacctccccgtgtttccaagtcagctttcctgcaagaagaaatcctggttaaaaaagtcttttgtattgggtcaggagttgaatttggggtgggaggatggatgcaactgaagcagagtgtgggtgcccagatgtgcgctattagatgtttctctgataatgtccccaatcataccagggagactggcattgacgagaactcaggtggaggcttgagaaggccgaaagggcccctgacctgcctggcttccttagcttgcccctcagctttgcaaagagccaccctaggccccagctgaccgcatgggtgtgagccagcttgagaacactaactactcaataaaagcgaaggtggacaaaaaaaaaaaaaaaaaa

SEQ ID NO: 3106 - DNA, 1396 bp, Homo sapiens
atgatccccaccttcacggctctgctctgcctcgggctgagtctgggccccaggacccacatgcaggcagggcccctccccaaacccaccctctgggctgagccaggctctgtgatcagctgggggaactctgtgaccatctggtgtcaggggaccctggaggctcgggagtaccgtctggataaagaggaaagcccagcaccctgggacagacagaacccactggagcccaagaacaaggccagattctccatcccatccatgacagaggactatgcagggagataccgctgttactatcgcagccctgtaggctggtcacagcccagtgaccccctggagctggtgatgacaggagcctacagtaaacccaccctttcagccctgccgagtcctcttgtgacctcaggaaagagcgtgaccctgctgtgtcagtcacggagcccaatggacactttccttctgatcaaggagcgggcagcccatcccctactgcatctgagatcagagcacggagctcagcagcaccaggctgaattccccatgagtcctgtgacctcagtgcacggggggacctacaggtgcttcagctcacacggcttctcccactacctgctgtcacaccccagtgaccccctggagctcatagtctcaggatccttggagggtcccaggccctcacccacaaggtccgtctcaacagctgcaggccctgaggaccagcccctcatgcctacagggtcagtcccccacagtggtctgagaaggcactgggaggtactgatcggggtcttggtggtctccatcctgcttctctccctcctcctcttcctcctcctccaacactggcgtcagggaaaacacaggacattggcccagagacaggctgatttccaacgtcctccaggggctgccgagccagagcccaaggacgggggcctacagaggaggtccagcccagctgctgacgtccagggagaaaacttctgtgctgccgtgaagaacacacagcctgaggacggggtggaaatggacactcggagcccacacgatgaagacccccaggcagtgacgtatgccaaggtgaaacactccagacctaggagagaaatggcctctcctccctccccactgtctggggaattcctggacacaaaggacagacaggcagaagaggacagacagatggacactgaggctgctgcatctgaagccccccaggatgtgacctacgcccagctgcacagctttaccctcagacagaaggcaactgagcctcctccatcccaggaaggggcctctccagctgagcccagtgtctatgccactctggccatccactaatccaggggggacccagaccccacaagccatggagactcaggaccccagaagg

SEQ ID NO: 3107 - DNA, 625 bp, Homo sapiens
  misc_feature (1)..(625): n=a,t,g or c
cggcctttcatcgttggtttaaaatggctaatcagaataaaaaataaaagggcctctttgtggaggctgggatctcccctatttagaggttagaacccaggtatcccctctacccagcaccatagtgaggtgggctgaggggtaacccccaagggacaatcggaggggcctaggcctgccactccttctctctatccnccgtttngggaatgtgatgaaaaatattggttttnggattctcctctcctggccttggattttaaaatcaagttaactgtgtaagctaggggaggctccaaggggccagnaggagcacactctaatccctctcccccaaggaggggattatccantattgtttgagctaggccaagttattttcctgatctcccaccaccaccagtnttnggangtttggaccccnnncctagggaaactaatgtnaatnaatagattcaantnggntaacaagntaannntaaaannnnnttcccnttnntttnccnnnnnnnnntnnnccnnnnttnnnnnnaannnnnttnncctntnntnnnncnnnnnnnnnnnnnnnnnnnnncnnnnnnnnnnnnnnnnnnnncnnnnnnnnnnnnnnnnnnnnnnnnna

SEQ ID NO: 3108 - DNA, 655 bp, Homo sapiens
  misc_feature (1)..(655): n=a,t,g or c
tgatccagtgctctcccatctaacaactaaacaggagccatttcaaggcgggagatattttaaacacccaaaatgttgggtctgattttcaaacttttaaactcactactgatgattctcacgctaggcgaatttgtccaaacacatagtgtgtgtgttttgtatacactgtatgaccccaccccaaatctttgtattgtccacattctccaacaataaagcacagagtggatttaattaagcacacaaatgctaaggcagaattttgagggtgggagagaagaaaagggaaagaagctgaaaatgtaaaaccacaccagggaggaaaaatgacattcagaaccagcaaacactgaatttctcttgttgttttaactctgccacaagaatgcaatttcgttaatggagatgacttaagttggcagcagtaatcttcttttaggagcttgtaccacagtcttgcacataagtgcagatttggctcaagtaaagagatttccttcaccactacttcactgggataatcagcagcgtactaccctaaaagcattcactagccaaagagggaatatcngtctccttcctgggcctatataagnctggtacaatgtggtgngctccaactttcatggaaagccattctatccatattatc

SEQ ID NO: 3109 - DNA, 447 bp, Homo sapiens
tttattacatttaatttttaataattagtaatatgtaataattcatgcttagaatatcattggccaggctggaaacagacccaggtgcactgctggattgctgagttcgagaataagcaccaggctcccatcccggtggagtccttgctgctggatgtgggtcttgctggtcaaatgaatggagacccggagcacaggcagccgaggattgggcagtcatcgggatggcggctcatctgcaaatagccagtgcacacctccaggcaacaggatgacgagtctctgcagtgtgccctgagaccctgcagctaagtcctgagatggaaaagccaagcttgcaggctcttccatggaccactgaaatagaaagtctggggataagggcccagaggtcttcattttttcggaaacactccagcagatttttatgcagttccattctggatg

SEQ ID NO: 3110 - DNA, 404 bp, Homo sapiens
caaaggtatatgtactttaattgtgacttgaactcaaggtaaataaattaaataattaataaattaaccttagcttactggacggccaccatcttatatgctgttcccttgactgaaatgttgtggggtaaatgactatatatgaaatcgggacttattggaggaattaatgcatctgataatggaggttgagaagttccacaacaggccatctgcacagcagagaccctgaaatgctggaagacggacttaatccagcccaaaaacctaagacccagggaagccgatggtgtaattcttagttcaaggccaaaatccttagatccttcgggaggccactggtgtatgccctggagtccaagggctagaaatcctagactctgatgtccacaggcagaagagtg

SEQ ID NO: 3111 - DNA, 1050 bp, Homo sapiens
ggggggggggggcacttggcttcaaagctggctcttggaaattgagcggagacgagcggcttgttgtagctgccgtgcggccgccgcggaataataagccgggatctaccataccattgactaactatggaagattataccaaaatagagaaaattggagaaggtacctatggagttgtgtataagggtagacacaaaactacaggtcaagtggtagccatgaaaaaaatcagactagaaagtgaagaggaaggggttcctagtactgcaattcgggaaatttctctattaaaggaacttcgtcatccaaatatagtcagtcttcaggatgtgcttatgcaggattccaggttatatctcatctttgagtttctttccatggatctgaagaaatacttggattctatccctcctggtcagtacatggattcttcacttgttaagagttatttataccaaatcctacaggggattgtgttttgtcactctagaagagttcttcacagagacttaaaacctcaaaatctcttgattgatgacaaaggaacaattaaactggctgattttggccttgccagagcttttggaatacctatcagagtatatacacatgaggtagtaacactctggtacagatctccagaagtattgctggggtcagctcgttactcaactccagttgacatttggagtataggcaccatatttgctgaactagcaactaagaaaccacttttccatggggattcagaaattgatcaactcttcaggattttcagagctttgggcactcccaataatgaagtgtggccagaagtggaatctttacaggactataagaatacatttcccaaatggaaaccaggaagcctagcatcccatgtcaaaaacttggatgaaaatggcttggatttgctctcgaaaatgttaatctatgatccagccaaacgaatttctggcaaaatggcactgaatcatccatattttaatgatttggacaatcagattaagaagatgtagctttctgacaaaaagtttccatatgttatg

SEQ ID NO: 3112 - DNA, 2627 bp, Homo sapiens
gctgacgccttcgagcgcggcccggggcccggagcggccggagcagcccgggtcctgaccccggcccggctcccgctccgggctctgccggcgggcgggcgagcgcggcgcggtccgggccggggggatgtctcggcggacgcgctgcgaggatctggatgagctgcactaccaggacacagattcagatgtgccggagcagagggatagcaagtgcaaggtcaaatggacccatgaggaggacgagcagctgagggccctggtgaggcagtttggacagcaggactggaagttcctggccagccacttccctaaccgcactgaccagcaatgccagtacaggtggctgagagttttgaatccagaccttgtcaaggggccatggaccaaagaggaagaccaaaaagtcatcgagctggttaagaagtatggcacaaagcagtggacactgattgccaagcacctgaagggccggctggggaagcagtgccgtgaacgctggcacaaccacctcaaccctgaggtgaagaagtcttgctggaccgaggaggaggaccgcatcatctgcgaggcccacaaggtgctgggcaaccgctgggccgagatcgccaagatgttgccagggaggacagacaatgctgtgaagaatcactggaactctaccatcaaaaggaaggtggacacaggaggcttcttgagcgagtccaaagactgcaagcccccagtgtacttgctgctggagctcgaggacaaggacggcctccagagtgcccagcccacggaaggccagggaagtcttctgaccaactggccctccgtccctcctaccataaaggaggaggaaaacagtgaggaggaacttgcagcagccaccacatcgaaggaacaggagcccatcggtacagatctggacgcagtgcgaacaccagagcccttggaggaattcccgaagcgtgaggaccaggaaggctccccaccagaaacgagcctgccttacaagtgggtggtggaggcagctaacctcctcatccccgctgtgggttctagcctctctgaagccctggacttgatcgagtcggaccctgatgcttggtgtgacctgagtaaatttgacctccctgaggaaccatctgcagaggacagtatcaacaacagcctagtgcagctgcaagcgtcacatcagcagcaagtcctgccaccccgccagccttccgccctggtgcccagtgtgaccgagtaccgcctggatggccacaccatctcagacctgagccggagcagccggggcgagctgatccccatctcccccagcactgaagtcgggggctctggcattggcacaccgccctctgtgctcaagcggcagaggaagaggcgtgtggctctgtcccctgtcactgagaatagcaccagtctgtccttcctggattcctgtaacagcctcacgcccaagagcacacctgttaagaccctgcccttctcgccctcccagtttctgaacttctggaacaaacaggacacattggagctggagagcccctcgctgacatccaccccagtgtgcagccagaaggtggtggtcaccacaccactgcaccgggacaagacacccctgcaccagaaacatgctgcgtttgtaaccccagatcagaagtactccatggacaacactccccacacgccaaccccgttcaagaacgccctggagaagtacggacccctgaagcccctgccacagaccccgcacctggaggaggacttgaaggaggtgctgcgttctgaggctggcatcgaactcatcatcgaggacgacatcaggcccgagaagcagaagaggaagcctgggctgcggcggagccccatcaagaaagtccggaagtctctggctcttgacattgtggatgaggatgtgaagctgatgatgtccacactgcccaagtctctatccttgccgacaactgccccttcaaactcttccagcctcaccctgtcaggtatcaaagaagacaacagcttgctcaaccagggcttcttgcaggccaagcccgagaaggcagcagtggcccagaagccccgaagccacttcacgacacctgcccctatgtccagtgcctggaagacggtggcctgcggggggaccagggaccagcttttcatgcaggagaaagcccggcagctcctgggccgcctgaagcccagccacacatctcggaccctcatcttgtcctgaggtgttgagggtgtcacgagcccattctcatgtttacaggggttgtgggggcagagggggtctgtgaatctgagagtcattcaggtgacctcctgcagggagccttctgccaccagcccctccccagactctcaggtggaggcaacagggccatgtgctgccctgttgccgagcccagctgtgggcggctcctggtgctaacaacaaagttccacttccaggtctgcctggttccctccccaaggccacagggagctccgtcagcttctcccaagcccacgtcaggcctggcctcatctcagaccctgcttaggatgggggatgtggccaggggtgctcctgtgctcaccctctcttggtgcatttttttggaagaataaaattgcctctctctttg

SEQ ID NO: 3113 - DNA, 490 bp, Homo sapiens; identical to SEQ ID NO: 1654

SEQ ID NO: 3114 - DNA, 1782 bp, Homo sapiens
gaattccggaaatgaccctgcccgggggcccaacgggcatggcgcggccggggggcgcgaggccctgcagcccggggctggagcgggccccgcgccggagtgtcggggagctgcgcctgctcttcgaggcgcgctgtgcggcggtcgctgcggccgccgccgcgggggagccccgggcccgcggggccaagcggcgtgggggacaggtccccaacgggcttccgcgggctcccccggccccggtgatccctcagctgaccgtgacagccgaggagcccgacgtgcccccgaccagccctgggccgccggagcgggagagggactgcctcccggcagcgggctcttcgcacctgcagcagccgcgccgcctttccacctcgtcggtctcctccactggctcctcgtcgctgctcgaggactcggaggacgacctgctgagcgacagtgagagccggagccgcggcaacgtgcagctggaagcgggcgaggacgtgggtcagaaaaaccactggcagaagatccggaccatggtcaatctgccggtcataagccctttcaagaagcgctacgcctgggtgcagctggcagggcacactgggagttttaaggcggcgggcaccagcgggctgatcctgaagcgctgctcggagccggagcgctactgcctggcgcggctgatggctgacgcgctgcgcggctgcgtgcctgccttccacggcgtggtggagcgcgacggcgaaagctacctgcagctgcaggacctgctcgatggcttcgacggaccttgtgtgctcgactgcaaaatgggcgtcaggacttacctagaggaggagctgaccaaggcccgtgagcggcccaagctgcggaaggacatgtacaagaaaatgctggcggtggatcctgaagctcccacggaggaggagcacgcgcagcgcgccgtcaccaagccgcgctacatgcagtggcgggaaggcatcagctccagcaccaccctcggcttccgcatcgagggcatcaagaaagcggacggctcctgcagcaccgacttcaagactacgcgaagccgagagcaggtgcttcgcgtctttgaagagtttgtgcaaggagatgaggaagtgctgaggcggtatctgaaccgcctgcagcagatccgggacaccctggaggtatccgagttcttcaggaggcacgaggtgatcggcagctcgctcctctttgtgcacgatcactgccatcgcgccggcgtgtggctcatcgacttcggcaagaccacgcccctccccgatggccagatcctggaccaccggcggccctgggaggagggcaaccgcgaggacggctatttgctggggctggacaatctcattggcatcctggccagcctggctgagagatgaggctggactcctgtccccgcgggccgctcacctgacatgtggacctgcagctttgtccccactgtgcatgccggcttgagactggagccccgcggtgcagggcagttcaccgggtcctgcaggaccaggtgccagccactaagggggggcaccgccgatgccaggggttttgcccacccgggccccagcgttcccagagccaaatgacactaacttatagaaggggagggggcaaagggcttcttcctcaggccagctcttctgaggaggctctgccctctccagaggtgccagaccgcggattttatttagcaagcccagaccttccggtctaacgtctcacaccacgacggactccccttcctaataaaactcaaagacaaaa

SEQ ID NO: 3115 - DNA, 1707 bp, Homo sapiens
cggcgctgggctgaggggaggggttgtcttaaaagtctctccttccccctgtaggggcggccggcgagtcccagtgagagcggagggtgccagaggtagggggccgagaaacaaagttcccggggcttcctccggggccgcggtcggggctgcgcgtttgaccgcccccctcctcgcgaagcaatggcttccaaactcctgcgcgcggtcatcctcgggccgcccggctcgggcaagggcaccgtgtgccagaggatcgcccagaactttggtctccagcatctctccagcggccacttcttgcgggagaacatcaaggccagcaccgaagttggtgagatggcaaagcagtatatagagaaaagtcttttggttccagaccatgtgatcacacgcctaatgatgtccgagttggagaacaggcgtggacagcactggctccttgatggttttcctaggacattaggacaagccgaagccctggacaaaatctgtgaagtggatctagtgatcagtttgaatattccatttgaaacacttaaagatcgtctcagccgccgttggattcaccctcctagcggaagggtatataacctggacttcaatccacctcatgtacatggtattgatgacgtcactggtgaaccgttagtccagcaggaggatgataaacccgaagcagttgctgccaggctaagacagtacaaagacgtggcaaagccagtcattgaattatacaagagccgaggagtgctccaccaattttccggaacggagacgaacaaaatctggccctacgtttacacacttttctcaaacaagatcacacctattcagtccaaagaagcatattgaccctgcccaatggaagaaccaggaagatgtggtcattcattcaatagtgtgtgtagtattggtgctgtgtccaaattagaagctagctgaggtagcttgcagcatcttttctagttgaaatggtgaactgataggaaaacaaatgagtagaaagagttcatgaagaggccctcctctgcctttcaaaaggctggtcacctacacatgtttaaggtgtctctgcacatgtctcaagcccatcacaagaaagcaagtacagtgtggatttcaaatggtgtgtaacttcagctccagctggtttttgacagctgttgctgtggtaatatttttgacatgtgatggtgatagtctctggttctccccatccccacaaaggctgttgaaccacagcaccaggaagcctgagaatgaatcctgagggctctagcccaggctttgtcccaggctttctggtgtgtgccctcctggtaacagtgaaattgaagctacttactcatagtggttgtttctctggtcttgagtgactgtgtccacagttcatttttttccggtaggaataactccttttctacatccacgctccatagagtctctccttttcagacatcctgggatgaaagaatttggcttttttttttcttttttttttggacatctgttttcactcttaggcttttaaacaatagttattgcttttatccctctcagattctaataactgagagcgatggggctatattgaatctctgtatgcactgagaactgagctatgaagagaatcttattaaactgctggtctgactttatggattgacactgttcctttcttttattgtgaaaaaaaaaaaaaaa

SEQ ID NO: 3116 - DNA, 1552 bp, Homo sapiens; identical to SEQ ID NO: 516

SEQ ID NO: 3117 - DNA, 3348 bp, Homo sapiens
gtactcctcaaccactctcctaatgattggaacaaaagaaaaaaaaagaaaaaaaaagccatgaagtcagcgagagctaagacaccccggaaacctaccgtgaaaaaagggtcccaaacgaaccttaaagacccagttggggtatactgtagggtgcgcccactgggctttcctgatcaagagtgttgcatagaagtgatcaataatacaactgttcagcttcatactcctgagggctacagactcaaccgaaatggagactataaggagactcagtattcatttaaacaagtatttggcactcacaccacccagaaggaactctttgatgttgtggctaatcccttggtcaatgacctcattcatggcaaaaatggtcttctttttacatatggtgtgacgggaagtggaaaaactcacacaatgactggttctccaggggaaggagggctgcttcctcgttgtttggacatgatctttaacagtatagggtcatttcaagctaaacgatatgttttcaaatctaatgataggaatagtatggatatacagtgtgaggttgatgccttattagaacgtcagaaaagagaagctatgcccaatccaaagacttcttctagcaaacgacaagtagatccagagtttgcagatatgataactgtacaagaattctgcaaagcagaagaggttgatgaagatagtgtctatggtgtatttgtctcttatattgaaatatataataattacatatatgatctattggaagaggtgccgtttgatcccataaaacccaaacctccacaatctaaattgcttcgtgaagataagaaccataacatgtatgttgcaggatgtacagaagttgaagtgaaatctactgaggaggcttttgaagttttctggagaggccagaaaaagagacgtattgctaatacccatttgaatcgtgagtccagccgttcccatagcgtgttcaacattaaattagttcaggctcccttggatgcagatggagacaatgtcttacaggaaaaagaacaaatcactataagtcagttgtccttggtagatcttgctggaagtgaaagaactaaccggaccagagcagaagggaacagattacgtgaagctggtaatattaatcagtcactaatgacgctaagaacatgtatggatgtcctaagagagaaccaaatgtatggaactaacaagatggttccatatcgagattcaaagttaacccatctgttcaagaactactttgatggggaaggaaaagtgcggatgatcgtgtgtgtgaaccccaaggctgaagattatgaagaaaacttgcaagtcatgagatttgcggaagtgactcaagaagttgaagtagcaagacctgtagacaaggcaatatgtggtttaacgcctgggaggagatacagaaaccagcctcgaggtccagttggaaatgaaccattggttactgacgtggttttgcagagttttccacctttgccgtcatgcgaaattttggatatcaacgatgagcagacacttccaaggctgattgaagccttagagaaacgacataacttacgacaaatgatgattgatgagtttaacaaacaatctaatgcttttaaagctttgttacaagaatttgacaatgctgttttaagtaaagaaaaccacatgcaagggaaactaaatgaaaaggagaagatgatctcaggacagaaattggaaatagaacgactggaaaagaaaaacaaaactttagaatataagattgagattttagagaaaacaactactatctatgaggaagataaacgcaatttgcaacaggaacttgaaactcagaaccagaaacttcagcgacagttttctgacaaacgcagattagaagccaggttgcaaggcatggtgacagaaacgacaatgaagtgggagaaagaatgtgagcgtagagtggcagccaaacagctggagatgcagaataaactctgggttaaagatgaaaagctgaaacaactgaaggctattgttactgaacctaaaactgagaagccagagagaccctctcgggagcgagatcgagaaaaagttactcaaagatctgtttctccatcacctgtgcctttactctttcaacctgatcagaacgcaccaccaattcgtctccgacacagacgatcacgctctgcaggagacagatgggtagatcataagcccgcctctaacatgcaaactgaaacagtcatgcagccacatgtccctcatgccatcacagtatctgttgcaaatgaaaaggcactagctaagtgtgagaagtacatgctgacccaccaggaactagcctccgatggggagattgaaactaaactaattaagggtgatatttataaaacaaggggtggtggacaatctgttcagtttactgatattgagactttaaagcaagaatcaccaaatggtagtcgaaaacgaagatcttccacagtagcacctgcccaaccagatggtgcagagtctgaatggaccgatgtagaaacaaggtgttctgtggctgtggagatgagagcaggatcccagctgggacctggatatcagcatcacgcacaacccaagcgcaaaaagccatgaactgacagtcccagtactgaaagaacattttcatttgtgtggatgatttctcgaaagccatgccagaagcagtcttccaggtcatcttgtagaactccagctttgttgaaaatcacggacctcagctacatcatacactgacccagagcaaagctttccctatggttcaaagacaactagtattcaacaaaccttgtatagtgtatgttttgccatatttaatattaatagcagaggaagactccttttttcatcactgtatgaattttttataatgtttttttaaaatatatttcatgtatacttataaactaattcacacaagtgtttgtcttagatgattaaggaagactatatctagatcatgtctgattttttattgtgacttctccagccctggtctgaatttcttaaggttttataaacaaatgctgctatttattagctgcaagaatgcactttagaactatttgacaattcagactttcaaaataaagatgtaaatgactggccaataataaccattttaggaaggtgttttgaattctgtatgtatatattcactttctgacatttagatatgccaaaagaattaaaatcaaaagcggaattcctgcagcccgggggatccactagttctagagcggccgccaccgcggtggagctccagcttttgttccctttagtgagggttaatttcgagcttggcgtaatcat

SEQ ID NO: 3118 - DNA, 368 bp, Homo sapiens
gaagagacgtggtaagtgcggtgcagttttcaactgacctctggacgcagaacttcagccatgaaggtaacaggcatctttcttctcagtgccttggccctgttgagtctatctggtaacactggagctgactccctgggaagagaggccaaatgttacaatgaacttaatggatgcaccaagatatatgaccctgtctgtgggactgatggaaatacttatcccaatgaatgcgtgttatgttttgaaggtcggaaacgccagacttctatcctcattcaaaaatctgggccttgctgagaaccaaggttttgaaatcccatcaggtcaccgcgaggcctattgttgaataaatgtatctgaatatc

SEQ ID NO: 3119 - DNA, 1610 bp, Homo sapiens
  misc_feature (1)..(1610): n=a,t,g or c
cgtaacaggacaaggagtcctgctccggcacgtggccacagaaaactacttaggaagcctgtggtgagaacaacaacagtgcctggagaatcccacggctctggggaagtgagccccgaggatgaggctgctcgcctggctgattttcctggctaactggggaggtgccagggctgaaccagggaagttctggcacatcgctgacctgcaccttgaccctgactacaaggtatccaaagaccccttccaggtgtgcccatcagctggatcccagccagtgcccgacgcaggcccctggggtgactacctctgtgattctccctgggccctcatcaactcctccatctatgccatgaaggagattgagccagagccagacttcattctctggactggtgatgacacgcctcatgtgcccgatgagaaactgggagaggcagctgtactggaaattgtggaacgcctgaccaagctcatcagagaggtctttccagatactaaagtctatgctgctttgggaaatcatgattttcaccccaaaaaccagttcccagctggaagtaacaacatctacaatcagatagcagaactatggaaaccctggcttagtaatgagtccatcgctctcttcaaaaaaggtgccttctactgtgagaagctgccgggtcccagcggggctgggcgaattgtggtcctcaacaccaatctgtactataccagcaatgcgctgacagcagacatggcggaccctggccagcagttccagtggctggaagatgtgctgaccgatgcatccaaagctggggacatggtgtacattgtcggccacgtgcccccggggttctttgagaagacgcaaaacaaggcatggttccgggagggcttcaatgaaaaatacctgaaggtggtccggaagcatcatcgcgtcatagcagggcagttcttcgggcaccaccacaccgacagctttcggatgctctatgatgatgcaggtgtccccataagcgccatgttcatcacacctggagtcaccccatggaaaaccacattacctggagtggtcaatggggccaacaatccagccatccgggtgttcgaatatgaccgagccacactgagcctnnaggacatggtgacctacttcatgaacctgagccaggcgaatgctcaggggacgccgcgctgggagctcgagtaccagctgaccgaggcctatggggtgccggacgccagcgcccactccatcgacacagtgctggaccgcatcgctggcgaccagagcacactgcagcgctactacgtctataactcagtcagctactctgctggggtctgcgacgaggcctgcagcatgcagcacgtgtgtgccatgcgccaggtggacattgacgcttacaccacctgtctgtatgcctctggcaccacgcccgtgccccagctnccgntgctgctgatggccctgctggggctgtgcacgactcgtgctgtgacctgccaggctcaccattcttcctggtaacgggtaacgggggcagcgcccaggatcacccagagctgggccttccaccatttcctccgcgcctgaggagtgaactgaatggacaccgatc

SEQ ID NO: 3120 - DNA, 397 bp, Homo sapiens
  misc_feature (1)..(397): n=a,t,g or c
gtacaaatccaaggttttaatggctgttaaataataaaaggaaggatatttgcactatatacattcngtccactgacgatactgtcagctggccatgcattttattgcacatataaacagtgtacaaggatcttgaagacgtcttagccatagaaggactgcatttaaaagaaaaaaaagcaattttacagaagactgaagccatttacattacacaaccaacttcaagaaaataataaaaattaatatcaaaagaaatactttaattttgaaaaaaaaatctctcaaaacaatggattacaaagcttcatgctaccatatatacacgtaagaaaatatttcaggaccccgcattctgaatgcccgtgaaggtgcagcaggctaaactcctacttat

SEQ ID NO: 3121 - DNA, 471 bp, Homo sapiens
tcaaacaataacttttattttatacttctctatactttgtagcaaatctttttttgctgaatttaatttataataaactttttaaattacatctctctctcttttttttttaaaatcaaggctcttttatgtcaaaatctttttttagctatattttagattaacatttaacatcccccccttgtgatctataccgttggatattcaggtattactgtgtgtgtaacagctaaaacaaggacgggaggagggaaaataaatggcagtgaacttggacggatgcatcaacaacagcagataaagctaacccctcagtgaccatagcagcatgtcttctggaagcctttactcttaccccagagatttcctcagccccttccctctctccctcctatcctccaaacacaaagccaacagtctgtcctttcgcttttcttgaggagaaatgtgcagtggaaatgatcaaaacaa

SEQ ID NO: 3122 - DNA, 463 bp, Homo sapiens
  misc_feature (1)..(463): n=a,t,g or c
tcaacttttttattacacagtaaagaatacaacaatacctgaatcatactttaaagattcacaggttgacagaccatacattacagtccaactaaggaaaaaaggataaacaagaaaccacagttcagacatagtagacttaaaagctcaagagtatgctgacaaaagcatgatgcctagaccccaccccccagtgttagtctaccattaacttgtggtacatgtctgaattaagtattgcacaacaactttaatttttcacaatgtcgcagaacccaaaataatattttaaaaaaattacttcaaatctgcatttcaacagtctccaattttttttctggtcccttgaggaatttcggacancatggagtcgctttnctttccctaagtattccagacgtaggcatggctttgcataaggtaaaaccagccttgaaatttttaaatccccaaggacatggca

SEQ ID NO: 3123 - DNA, 248 bp, Homo sapiens
  misc_feature (1)..(248): n=a,t,g or c
tcatattgtacaactatgatattaggtattaagcgacgtaattctttctctactagtgaaccagtttatttcacttagcaaactctaaattgagggaaatatataatctgagaacacacagaaaaatatattgaaaaaccaatagagaattatttttaaccatcataaaaactcaatcttaattaactgatagtctttaacttaaaaaaaagagtaatcnagattggaaattgggaattaaaaatatt

SEQ ID NO: 3124 - DNA, 414 bp, Homo sapiens; identical to SEQ ID NO: 2804
  misc_feature (1)..(414): n=a,t,g or c

SEQ ID NO: 3125 - DNA, 394 bp, Homo sapiens
aacaaaaaactaaataaatttattccataaagattttaaacttctacaattcattaaaaagacataaattcaaaagtcaaaatggtaaaaatattcacaacatatgacaatcaaatggttaatttccttttataaagagtttataggaataaatgagaaagaagtaaacccaaataaaagtagacaaaggtcatgagcagttcatttaaaaagaaatacaaatatctataaacatacgaaaagataatcaccttaatatcattaataattaatattttctcccacatcagcaaaaatctgcatgtttgttaaagctgagtgttttaagggtgtgatgaaatggacaccatttacacaggactgcctttcaggaaggttctctgccactggaaaa

SEQ ID NO: 3126 - DNA, 429 bp, Homo sapiens
cctcaaaactgctttattaggaatgtaccagggattgagttaggggagttggacagccccggctcctataggagtcctacttctctccagcatcctgtgccatcctcttgacgtaatcgttgtacattgtgtacacagcacctagcatgattgcacccactgcacaggcctgcgctgccactcgggtgtgaatcaggtgtatggacatcttggtggaaccacgagacctcagccggtaaatcctgtatgctgctaccaccaagcagcctcctaagcctataggaccagtggagattcccgagtcttcctcaggagcttctcagacacacagtcttcatcgtcaggtgggtacccaccagcgtctgttagcagacataatcctggacctggatgtaagcagctgagactcctatgctgcagcccgtccta

SEQ ID NO: 3127 - DNA, 531 bp, Homo sapiens
  misc_feature (1)..(531): n=a,t,g or c
aaaacaatgagatagctttacatttcccctttgtttgaatgagaaaatggatcttgggttgctatgctagaacacttgtagattgctgggtcctttgtaagggggccatggacacaccacactttctttcaatccttacatttgaagcattgatattcttcaaaaccttcttgttacatgtgcgcaatagaaatttctaatgttcatgacttttatctttcctgtccatcaattcactggttgtaaatgcttcctgagagctgtctaggtctgtatcccagattgttgcttaatgacatctgacagatgcattgttttctgaaatcagcttaagacaccaattgtggcaactgggaaactcattacctgctgcattggatcaactatgggaaggttgggagcagggggtggggcggaggtcaccctaaccaatcaatggaagggcaactcacacctggctcccaagcctcagctttgagaaacaaacacgtttataaggaaaaaatatataggcncattattaccggaagt

SEQ ID NO: 3128 - DNA, 466 bp, Homo sapiens
  misc_feature (1)..(466): n=a,t,g or c
tttcggttttcacacttttattgtaaagctcgggaataattacacgggtctttcattgacagctcagcaaacaaaccggaaacgaaccgaaccggagggngtaggggcggtgctgcgcatgctcgcggcggggtggggggggggtgggggtgggntctctggggtacaagagtcaagaccccagcagcacagctcccaaaggcaccagacgaccccgcagcctgtacccacccctcgcaatcttggaccacctccccaagcttagactaagtcaagcaagggccataccctgagtctccagcctcccagcctgggcccctagggagctggagaggtatgggccaaggcagtgggggtttctggaagaaagaggggctgaggctttgagatggccacagtgggagacgggggctctgcaggacgccccttacaccctggccccctgaggtgaagaagagaattcacc

SEQ ID NO: 3129 - DNA, 252 bp, Homo sapiens
ttttttttgggtgttttattatttatttacttgacaggtaacatcgatttggtcctacaagacaccatgctataggcttagctacttgctgttgcacaagagaactttcctgaactctcaggaagcccttgcatggcctatcgaggacagctcagtcactgaagggaaaaattccataccaaagaagagagaaaaattccataccaaagaacagacttcccccagggaacctccgtcctacagcccttcacg

SEQ ID NO: 3130 - DNA, 178 bp, Homo sapiens
tttttttttacttattcactcaacaatcatttattgtttgtgtgcaaggcctgtgttaggtgccaagagcagaaggaagaagatacaaatatgaatgggcatattctgccctccaggaacatacaatctaagagtgattaattgcatacaaataattgtaataccagatagaatgttg

SEQ ID NO: 3131 - DNA, 567 bp, Homo sapiens; identical to SEQ ID NO: 1667
  misc_feature (1)..(567): n=a,t,g or c

SEQ ID NO: 3132 - DNA, 406 bp, Homo sapiens
tttttaagagtatacaagtttattttaaggtgttcatagggttaccagttggataggtcataataatatatagagatatgggaaattaagacctatgaagttttaattatttgcataagagtatgcccttgcatcataagaaaacatataaaaacagaaatatgtttcaaacttgtatataacatatatatacatgttcaacttgatcaggttcttactgaaattatttatttatttttattatactttaagttctgggatacatgtgctgaatgtgcaggtttgttacacaggtatacatgtgccatggtactttgctgcacccatcaacccatcatctacatcaggtatttctcctaatgctatccctcccctagcccccatccccccaacagggccccagctc

SEQ ID NO: 3133 - DNA, 429 bp, Homo sapiens
tttttttactgaaacaagaaactctcagatgcaagtcaaaaagcagaaaatattttacaatattaaaaagtcatctgtagttaggttcggcatattaatgagatcctgagcactgagcatttatggacaatatggccttcgtttgatgcataaaaaggaaattcaacacaaacacgttgttaaaaccgtgccagaagatgcgctagagttttctctcattttaattacaatcagtgccagtatctgtattacctgtgaaggcctccaagaaagggtcatggaagcttattgggaataatcctctcaattagaaaaaaagaaagaagaaaagaaaatcagatccattgtggtttagaaatagatatttgcatggaaaagtttttatctcttctctttcctctcctggtaagtaaagatttgccattggta

SEQ ID NO: 3134 - DNA, 458 bp, Homo sapiens
  misc_feature (1)..(458): n=a,t,g or c
tttttttttttcagcttttaactgtttattataaagacatatttacacagaacaatctttacaaacattgaacacaggggaagggaacaatttcttaatgaacagggccttaatatctttgtataaattagtataagaatcataaacaaccactttaaataaggcagcccccctagcccacccactaccctcttctgttccctatctcccagctttcttagccatcccccactttctccccttccccacgggcttgggcttggctgcaggtcatggcaggccgatgagnagngagacacagaaaggaagggggaaagaaggcccaatccctgatgggggcgtcagtggcagaagagactttctgggcaccgaccagtccccactccaagcatggagcctttaagcagcagcagcagcagcagcagcgttanagcaagcataggtaaaggggcttgggg

SEQ ID NO: 3135 - DNA, 399 bp, Homo sapiens
tttttttttttttttttttccattttcatatcctattttatttttgaagtcagtgtccagaaagaaaccgacgattcactcaatcaacatgtaagcgactgaggcatccctacacaccaggtttgcaggctagggaccagagacacgatggttaaacaagccagagccctgtgatcctagggcttacaatgctggcataagaaaatccttctggactcactgtccccatgcttgtgactgtcatgtgccaagtgcgctttacacaatctcatttttccctcaacttggggataggttttgtatcattcccattacagatacggatgctgaggttactgagtggaagaggaaacctgaattctgctgctggaccccaaaactcatgtttaattacccaaa

SEQ ID NO: 3136 - DNA, 420 bp, Homo sapiens
  misc_feature (1)..(420): n=a,t,g or c
catgttgtccttttattgtgtcaaattataatgatatcattaaaatcctgctagattcagaaaaaactgtagggaagcaataaacaatttgactttccaaatgatgaggaaagttattgaatttaccaaacataaatataaaaatagtattttgttgtataattaagacttatagctagagaagtagaaatgtacacaaaaaaaacatttggtatcaataatttggttgtgcattcatttattcagtcaacaaatatttagctgagcactggctagctgccaggtattgcactaaggacccaaagatgggaagagatgatgtccctgccctcatggagcttgcagtcgtgttgagcagactgtcaaaccagatttaggtaaggcaatgtgacccagtgcccatgntaccaaaccagggat

SEQ ID NO: 3137 - DNA, 422 bp, Homo sapiens
tggaggaataagcattttttaatttcttatataaaatgctaacttcttgtcaggacatactacagactatgcattgaattttttgacaaacttcctgtaatctttttattaatttacactgagggaatatagcatttaaaaaacaattacatttaaaaatctggattcttgatgttaaatctcttcgactccagatacacaatttcctggaagctgatggaaagtgattctatttctgacaatgaaagaggctcagaaagagtcctaatttgctttcacagtacaggcattttccaaaacctggttctgggcttacggagcacacacacacaaatcttaatgcaatgaacaatatttcaaaccttatttcccaaagcaaaacctagggcttaagacgtcaaaatcttccaacagttctagac

SEQ ID NO: 3138 - DNA, 572 bp, Homo sapiens; identical to SEQ ID NO: 16

SEQ ID NO: 3139 - DNA, 403 bp, Homo sapiens
  misc_feature (1)..(403): n=a,t,g or c
tttttttttttttttttttttttgcattgttttacatcttaagccctttattgactacaatgcagaacattttattttaagacacagtgggttttgtttttgttgatgttttcaccaattcaactgaagacgaaagcaagacaatcaaatggtaactagtagcagcctatcagtaaatgagggcaagtatagagactgttctttggactgaggttaaatcaattagtcaataaaggcttttccactgtctaataattataacatattaacagtcgccaaatagtgttggatgggactcctctagaaataactaaagcctttcattttatacatgaaatagccacaaaatgtagatgggttacatcaactcattgggatttgcccatttaaattacnctgagat

SEQ ID NO: 3140 - DNA, 634 bp, Homo sapiens
  misc_feature (1)..(634): n=a,t,g or c
tcagaagcactaaaaaaatctttattggatgtccgcaacaacccatgcaatggggtaggagttggagacaccaggaaggcttggggatagaaacacaagatgcaagtccttgaccacagaatcagatcacacagtcacctttccttccacaatatcccagggacaatgaaagcaagttcaaccaagatgctgaaagagctggatcattcccatctcatttcagtggcatcacagattctttggagttgcatgcttgcaacgtggaaatgtgtttcccacagccccactagggattctcaggctaggaagttgccaaactgcaagactacatcactgacctggtatcccaggagcagcaggagaggaggaggaggaggaggagttgtcctgttcctgtcctgagtgggccccttcatgataacggggaaactggccttggcctctgttacctcctctgtccctgtccccaatcctgggagcatgtgtgagttctgtcttcctctaccacagtctcccctctgcntccctccggagcactccctgccatgacccactctctaaaatgatccccctctccttgctaatgacatctcagatgggccagaaganagcanctgatggattagtcacctaa

SEQ ID NO: 3141 - DNA, 447 bp, Homo sapiens; identical to SEQ ID NO: 2269

SEQ ID NO: 3142 - DNA, 464 bp, Homo sapiens
ggtatacaggtgccatttaatccattcaaatttggaagctacatcttcaagggtctgagagagctcactccccccatatattccccctttacatgttttcttataagacatacagtttaatcaattaacaaactaaacagcttatatactggcaatatattacagatgggtttatgtcagagtaatagatcacatgaaatggaccatgtggtaccccagtgcattatgtcttggtagagccctgaggacactgacagtagcatctctaagtaagtagtgctgtatgaatacagacacatgcggatctgtatctacatccatctgactaggccaaggagcaggtagatgcaagattagagacacacacatgctggatggggccactgcacaccttgtcatgccatttaaaaggggcagttacaggttgcccggttttgcagccattaaaattacactttatggaa

SEQ ID NO: 3143 - DNA, 253 bp, Homo sapiens
tttttcagctagaaataagttattttattttaaaacacatacagattaataaatattactggaaaacttaatagcctttttatttacatgaggcaataacaacatgctatgactacatctataaagcaaaatataagcaggtcttggccactgacacatgtgtctatgtatgctaattggaagctccccaatacatgtctatgacaaaacttttacacaaccaatcaacatttgacattttttacatcttctt

SEQ ID NO: 3144 - DNA, 419 bp, Homo sapiens
ttttttttttttttttttttcattttccttgaagtttattgactgttactggtggcagacaaattccataaacgagcaggttccatatggagcaagtagaaggggagctctgagttggtgaggaaggatgcgtggagtggggacttggagtaaaggatggaaaggtagatctctcctttttccctccattcccataaggatactggattaacaatgggggctatctgctcagcattccctctccaaattggagccagagaggggaaatgatgcaaatcagaggaggaaacacctcacagctcctctgtttctccatccaaggggatgccaatatccacgttgtagtctacaggctccccagagtcagccagggaataggggttcgattgaaaagaaggcctgttggaaaaggttttggt

SEQ ID NO: 3145 - DNA, 449 bp, Homo sapiens
tttttttttttgctgatctagacttattaaatttatttcatgtcattgtggtcacttttacagctgtttagacttattttcaatcacattactcttcacagaattcacagaattcattaactaactagtatgttacatccaagggttcttagtagcacattgaaatagaaaagaggcccacgagttgttgcttgtgtgtggaacctgagtctgattacttagacagatgtctagaacattattgctttattaggcctatttttaaaaataataaattattcctaggaaacccaccctgccaggtgctcattctgcgactgctgtgggttcactcagaacatacctgactggtgggtgctgaatgaacctcccacccatgtaccctgctgctccggacgctctgagggctagagcaatgcccctccatggcgtgtaaacattttctacag

SEQ ID NO: 3146 - DNA, 407 bp, Homo sapiens; identical to SEQ ID NO: 1704

SEQ ID NO: 3147 - DNA, 328 bp, Homo sapiens
aatcgttgcgattaactttattaatattttaaaatatgaaaactgtaaaacatagtatttatgtaaacacctgaggactgttcaagtgggtacagcatcttcatacaaacaacttgaaagaagaccaagtttaagtaagaatcttatgacatgtaaggaataacataaatgaagctattctttaaatagttgcattcatgtctaaagtacatttggttttctaaaaagaaaatgtacattcttgcccctggtgaatattttattggcatttacaacaaatggctaatacttttataactgattctcatagcttataaacattacatca

SEQ ID NO: 3148 - DNA, 329 bp, Homo sapiens
caaaaacagattctaacaagtacaaagaaataattaacaaaagctcatgtgtgcccaaaataaagatagagatgtaggcataaactctataccatggacaccttctatgagtcacgaaaatatcagtcatatatatactggcacttagtctggtacatgcaaatttcaaggcaattcctctccatctgagaacgaggaattgtgtcattttaaggccaaattgcagtccaattgccacaagtgcaaaaccaccccacataaccacctatttgtaatcatggaatgatagcctcaaccaaccaattgtgccatacatcattgttaagact

SEQ ID NO: 3149 - DNA, 354 bp, Homo sapiens; identical to SEQ ID NO: 2274

SEQ ID NO: 3150 - DNA, 292 bp, Homo sapiens
ttttgttgtttccaaagtcaatttattgaatattaagtcataaagccagtgatataattttaatgaaaaatatcctgtatcactcaagacttaaaagaacaaaaataccccttagaaacactgctttgaaaaataatcacattaactttacacacaacagagtcctttcttaagctttatttaagaaatcgagtactatatagttcaatatatataagacacatccagtattgtgttcctgatagcaagtgcatagattttgttaagatatcattttcactcaatagaaacg

SEQ ID NO: 3151 - DNA, 235 bp, Homo sapiens
catgagatgatatttaatcttacaaaaggaataatgaatataaaaaataaaacaaggagttaccatttttcctctatcagaggccaaaaagttcgaaggcacaatgtttgcaagaatgtagggaaatggatatgctcagtttatgtacttttggcagttatgcacactggtgcaacttctttgactttataggcaatcataggcaaattttataaatgtacacaccctcttaaga

SEQ ID NO: 3152 - DNA, 380 bp, Homo sapiens
tttttttttttttttttttaaaaacaaatctaggtatttatttaacacttaaaagagtacttactctgtgccaggaactattctaagcactttgcatatattaattcatttaattctcacatcagctctctttgctctccaagtcaatacattttcatctagagctgggattctaagccagacttcattaaccacccacatacccccttaaaaccacaatgctagattacctctcaatgagtgtaggaaatggatgtgatgaaagacagaaaaaagcatgaggcctaaatgtgtgaatggcttgaggaatgaatgctctgactgaagaaagaatgcctgagatccgcacactccttccactggcctgtagaggcagcagc

SEQ ID NO: 3153 - DNA, 268 bp, Homo sapiens; identical to SEQ ID NO: 29

SEQ ID NO: 3154 - DNA, 342 bp, Homo sapiens; identical to SEQ ID NO: 1707

SEQ ID NO: 3155 - DNA, 330 bp, Homo sapiens
gaacgctggtgatggttcatgcaaaagattactatgcaaggagcaaaatctaagactgctgtttttcccaataaattcaattgttttccacaatgtagaattttaatcttcaaattaagtgtagctaggacagtgagtgaaactaatcactgcttgacttttattttcatctaggaaaaataacatctgatgtcaccacattaaaatgccttcctgcttaatatcagagaaaaaaatacatgttgccagtttagactcagcgcagtttatcatttggtccaaatttcatattcaaactacaaaaaatattttttaataaagaaaacatat

SEQ ID NO: 3156 - DNA, 123 bp, Homo sapiens
caaaagtcaccaaggcaaaaaaagttgcaagcaatcttggttactgagaatagaagtgtagtgaaatactaagtactatccttggcttggggattaaacctatataacaaaagtgaaaagggg

SEQ ID NO: 3157 - DNA, 400 bp, Homo sapiens
agacatggtagtttctatatttaaagaagagcgataagaaaccattaacgtttaatttatgattcgcacttgtcatgctaatttatatttttaaagatttacattattttgagtaagttctaatcctatgaaatgatgcagatgtcaccaacaacttaaattcaattctgatcttatactaatacataattctaaatatattactttgagtaatacatgtttacttagatttactatattaagtataggttttgtgaagtcgtaagtgtatacctatatagtttcttgctattcttgattttcataataatgaaggtcaaagtgcccttctgctccttcttgttctgggctctcatgagcattgtcaggatcatcgtgatcttcactttcatcatcatca

SEQ ID NO: 3158 - DNA, 407 bp, Homo sapiens
aaaattaagacaagtttattgagtaaaaaaatgcatacattggaacggcaaaacatcaataaggccctaaaacaaaaaatacagttatgctttaacaaattcttagcaatgtggcccacgctttttaaaaaattgacgtgttggcagtgtttgttagaacactgacgtacatcccaaatagtaataaattcagtatgaaattatacgcataaccttactcaccatactactttttctcccaaactattgtgacttctttttgctctctgattaaaacaaacaggtaacatccttacacctttgctccatcccttgggctttaaaaagaatggctgtagttagttttgattcactatatactctctgtacttgaggaagagtaagctgtgtttaaaagtgcccttttc

SEQ ID NO: 3159 - DNA, 408 bp, Homo sapiens; identical to SEQ ID NO: 2283

SEQ ID NO: 3160 - DNA, 445 bp, Homo sapiens
aacatttatttaaaaaactttattttgctttaaaaaaacaattattcaattcatgaagattaaccaaaatacaaaccccatcaaagtttattacaataatctttcataaaatagcattaaaaaaagttaatattttaatgtaaaaatcacaatgtaaaaataaaaactttagttttagtgactaaaataaaagcagataaataatcttcttcacagggaaaaaatacttgagggaaaaaacaatggtataacatgtgtaaagcaggaaatttaaatatcagcttagttcctcattgccaacatggcatttatatcccagatgagatttcgtaattgatccataatttgtttcagctgttgattcttctgtttgagttttttatttacttcagcaatttctcgcctctcttcactagcaaaacgaggtgggccagccgatcatcat

SEQ ID NO: 3161 - DNA, 216 bp, Homo sapiens
  misc_feature (1)..(216): n=a,t,g or c
ttacttacacctttctattttttattttttacatcaaacaggtaatgtgatgatgctgtaacaaggtttgagggaagcatatctgacacatgagcatgaaaccaaatcaccatgcttatggactacaaaaggacctaagccttttaaactagactgtctcaactgtgcattaattatgtatttagatataggatatgtgcttgggaaaatgtataa

SEQ ID NO: 3162 - DNA, 443 bp, Homo sapiens
  misc_feature (1)..(443): n=a,t,g or c
tgccactcaacccagtaagccatatgcagagccagtcaggtcagtgagagaggcatctnagagacggtcttcagattcctaccctctcgctcctgtcagagcacccagaacactgcagcctcaacattggacaacattttataaaccacatgctcccatcatcagtatcagggggaatgaggagaagccagcttcaccctcagcagcagtgcctcctggcacagatcacgatccccacggtctcgtggtgaagtcaatgccagacccagacaaagcatcagcttgtcctggggcaagcaactggtcaacctaaagaagacttttgagggagcttgggtttgcctgatgtggaatccaatgtgttcagaggaccaaggcttaaaacggattgcaaacagttttgaaggacctcggaggtggaatttccacaattttttttaggg

SEQ ID NO: 3163 - DNA, 189 bp, Homo sapiens
  misc_feature (1)..(189): n=a,t,g or c
gttcagggcagcctcactggttgacataataacattttatnaaagataatacgnttttaaaaaatcaaatctgccaaacccggaccaccctggaattgctagcacgcctacagggattttnggttacagaaaggcatgcccaagattcaggagagcagagacatctgagcttgtaaatagaataaaagg

SEQ ID NO: 3164 - DNA, 216 bp, Homo sapiens
  misc_feature (1)..(216): n=a,t,g or c
ccaagaggcgagtttattgggggaggggctggtcaagtcatcagtgcacactgcatccccgctaagggcaggtcagtccagtgtgtgggccgcgggggtcacaggcatagcagnaggagggggagtnanctacccccacgggnccaccccnagcccagtccaggggtnggagggagggggtgacccctgtcgaggtcctcaggcatctttggctga

SEQ ID NO: 3165 - DNA, 291 bp, Homo sapiens
aaaggcatcgtgctgctcgaggagctgctgcccaaaggaggcaagaaggaacagcgggattacgtcttctacctggccgtggggaactaccggctcaaggaatacgagaaggccttaaagtacgtccgcgggttgctgcagacagagccccagaacaaccaggccaaggaactggagcggctcattgacaaggccatgaagaaagatggactcgtgggcatggccatcgtgggaggcatggccctgggtgtggcgggactggccggtctcatcggactttctgtgtccaag

SEQ ID NO: 3166 - DNA, 419 bp, Homo sapiens
tttttttaaaattgaatcacttatttttttttaaagccctgcatagaaattcccaaggtatcaaaaacaaatgagagaagccttattcattacattagccaagaatgggtgtggacgtgaacattctggaagggtgacgctgatgacttgagaatgtctaaggcacactttgtgttctttgcaacatcccatgagcaagtacgcaggggactgtgtcctcgggattcaggggagctcttcctttccctggcatggccctgggtgcctggtgaccgatatgcagcacccctgggcagaactccgtctggattcagtgcacgccctgcttgggccagcacagctctcgtgcaaaagcacctttgcagcttctgatcgcatcgtcgagctctaggcacttgttcaggcctggcactgcagat

SEQ ID NO: 3167 - DNA, 331 bp, Homo sapiens
tttttgaaaatgaacaaaataaagctttatttgaactccctcccctacagatcattcagatgcccgggaccatgtccaggttcctctcagcaacatggaaagctaagccatttcacaaacgcacaactgtagctacactacagccccccatgcccagggcacagctttgttgctaagcctgtaacaaaagaccaccactcagtatttgtgtaccctgcagccaacaccacctcctgggcttcacaggttcactcacccaagaggccagcacaaccacgaccgagtgggtactcagtggcccagacaccccccgaacactggcactgcacaa

SEQ ID NO: 3168 - DNA, 460 bp, Homo sapiens
ttttgagtctcagattgaaatttaataagcatttgaagtgaagcagatagctctggtgataacgctttataggtttgcaacaaagcaaaacaaaacgaggcttagtgatgtgtcttggcactatttagataaagtccaggatgcaaacctgtggactggctgtcctgccatcctcaccaaaacccccaaccaggtaaagctgatcattccaaaggcaggtgcgatggcccatgcgtttcatcccacgatctgcacaggggaagtggaaccacaaaggaggagatgtgcgagtatcatagatgtagagatcattgcagatggtgtctctagctctggtcagagtttctccaccaaacagcacagcaaagggcccgaccacagaacatgagtgatgccgtagtccatggggccccttctgggaccctgcccactgctcacaagccttgcaagctgttccatc

SEQ ID NO: 3169 - DNA, 464 bp, Homo sapiens
ccagtttgattcgtttattgacaaatcaaatgaaaaaaattcacttaaaagaagggtatgtgatcacaaatgtagctaacagggggaacgcatacagcaccagggagggagagtgaggctggacataccattacagagaggaggaagagaaagaatggcgcggggggcggaggaaagagagcacctgccaaaaatcccacactttccacttctcagctatcactcaatcatttttctggacagggttaacagctagaaatggtttaagggcaacatccaggtagtttgtctggaagatcagggagatgaagagttggagagaatgtcggtgtagcattttgaaggattctccagcttgaacctgttgccagaacccttttcatggtgaactgggagtcaggaagcttaatcctggtctcagctcagccatgaacttgctgtgtgactttgggtgaatcactttc

SEQ ID NO: 3170 - DNA, 399 bp, Homo sapiens
cttttttttttttttgaatctctacaagtataatgtagatcaaaagaagctgacacaaaagattgcatattgattgattacatttatataaagtataaaaacagacaaaattaatctatggtattaaaagtcaggttgcctttgtaagggatagtgacaagagaagacttctgagatctggaaatgttctatttctttttctttttttcttttagagacagggtcttactctgttgcttaggctggagtacaggatgcaatggtgcaattgttttatttgttgatctggatggcatatgttcccatgcatgagtgtgtccacatgtgaaaattcactaagcttaccatttgtgtactttcctatatgtatactccaacaaaaaaaagtttgtataaatt

SEQ ID NO: 3171 - DNA, 417 bp, Homo sapiens
attttttttttttttacaatataatctgttttattttacacttctctgattattgaaatctaaatagaggtttttgctaacaaacaaaaaggaaaataaaaagacagcaaggacacgattaaatgttgagtgcagatgaagggttgtatgaggccccatcctggggaggctgtacaccttcttggcacagcagcagtgtggcccacggagcttgaacctggtgaagacagcaagtaagccacagctcaagagttctgaggcttgggaacagaaaagagctccttcctgctccaccccaatctgggttgcatgggcatggaaaagagcaaacacaccctgcaaagcatactggacatgcctcttctttaccttctcaggccagaacaccctcctctccacaaacgtgtgcacacttgc

SEQ ID NO: 3172 - DNA, 245 bp, Homo sapiens
gaaacaaactttaattcccaagccggacccttaagtcacaaggaacgtcagatccggctcactccctgacagggtgaattggaaactggcccctacttggtctctaaccccttccactgggtctagtggggactctgacgccgaacaggggctgtagatcagtgagtgtgtatgtgtgtgtggaggggcagcaggggccgctttccacgtggttacataagcacgtgttggggttgggccggtgt

SEQ ID NO: 3173 - DNA, 361 bp, Homo sapiens; identical to SEQ ID NO: 1951

SEQ ID NO: 3174 - DNA, 440 bp, Homo sapiens
gcttataaatataatttattacctgtttaaaaattctttcttacattttgtacatgttggctgacagaataaatgcaggcaatttacaaaccaaggggactgcagggaaaatcaggattggcagccagggagagaaaagaggcacacccggagctggtatccctcacctccaccactcagcaaggcgccggacagatatccggaggcactctgcctctgccggggggtttttttagaaaaggaattgcatagaagatacagcaagagggaactccacaacaacaaaagtgttccatatcggaaaagccaaggttgtcatgttttgtttaaaaaagaaaaacgacaaagcacaaaacctcaatccgacctttctgcagttgaactgttccaaaggggacagtaggtggatgacactgcctcttcaacacgactgctgggga

SEQ ID NO: 3175 - DNA, 281 bp, Homo sapiens
ttttcatgaatacatatatatttatttaattcataatatagcattttggatgggctggaatattgtagagagggatgaggctgtgtaatccacagatgctcatatttctgtcactaggagagacactattggtccagagctcccaatacaaacaggcgtggggtaaagcatttgataaaaaatagtccaacaatagtctaataaatagtctagccaataacaacaatacagcatatgtctgaagctggcagactacaccataaaaggcagttttgtctgac

SEQ ID NO: 3176 - DNA, 396 bp, Homo sapiens; identical to SEQ ID NO: 2287

SEQ ID NO: 3177 - DNA, 421 bp, Homo sapiens
agaaggaagatattcagggtttttatttttattttttgagtctgggtctcgctctgtcacccaggctggagtacagtggtgagatcatagcttactgtagcctcgacctcccgggctcaaagatcctcacacctcagccttccaagtagttgggactacaggcatatatcatcatgcctggctaaattaactattttattttaagagatgtggtctagctatgttacccaggctggtctcgaactcctggcttctagcaatcctcccacctcagtctcctgaatcactgggattacaggctggggcatcatgcccagctctaggtttttaaaatgtaggcaaggaggtcagcatttacacaaaagcagggtttgatcttaggaagcttaataaagagaggggtctaatcaaggtttcctgt

SEQ ID NO: 3178 - DNA, 466 bp, Homo sapiens
ttttttttatactaaaataaggttatttacttcaaaatgatacattggacataatctgtatatagaacaaagcaagtaatggtaaactcttaaggcaccttttaaaccagatgctgtacaaaatacatttagtgtgttacacgtcaaagacgaatctatatttttggtgttttacaactgcctgataaaactgcttgcttttacccttctttcaatgcctatgtacagtttcccctaatgaagcaataatgatatttccattttatacaatatatactacattttagtttttaaatgggccaggacaaaggtcactaaaagggcttaaataattccatagaaaacagaatacagagcataagctaaaattacaatagttaatcctttacaagagccatattcacatactttccttatgggaccatcattacacgtggcttcacaggatgctgtgctggattttggt

SEQ ID NO: 3179 - DNA, 318 bp, Homo sapiens; identical to SEQ ID NO: 1957

SEQ ID NO: 3180 - DNA, 406 bp, Homo sapiens; identical to SEQ ID NO: 611

SEQ ID NO: 3181 - DNA, 397 bp, Homo sapiens
ttttctttcctataaaattttatttattacataaaaaattctatacatttgttagactaaaatacagttttcattataattctggcaactgagtcagtacacagagaaaacttagcattagatcagcacttttctttctagttcgtatttctgcacaagaaaaacatttcaaagctccgtttcatataggctgattgttctctgaagccagatggaattccatccaattcagagctcttggaagttaatttcccagcaagatttgataactccaactccagaaagttaattgcttaatatacatatttttaaagtcctctgagagcataatgctccatctgtaaagtctgcactgtgtcaataatgaccgtcacaaatactagggctacaactgtgt

SEQ ID NO: 3182 - DNA, 336 bp, Homo sapiens
tttttttttttttatgtgaataaatacaaaagattttattttttcctcttaatttctttaaaatacatatcattatttaaagcagaaattgtaacttatgacaggacttacaatatttaaatatgtagatttaatatgtatgacaactacagcataaaagacaggtatgataaatggatgtacatacttacaagatttctacattttatgtgaagtggcacatcaactctaggtagactgaaaaattaagaatgtatattgtaatcactagaacatccaacttaaaaaaattattaaaacagtatagctaaagagccaataaattaaaatacaatt

SEQ ID NO: 3183 - DNA, 381 bp, Homo sapiens
ggggttgaagagtttatttattgctctgcccccttggcacagcaagcccaggctctaccagcaacgatagtcgggataggtctcagacacaaactcaggatggataacatagttgtttctctggggaccaccagacttcttgaagtgacttgtgtcccatctaaggttcggatatgggtagtatgacggcgggggagttgtaacagcacactgcattccgggccggtgctcgtagggaggtacacatagtcggttgctcccggcaccaaggccgcacgtgcggtcaggtgcagggcgccccgctggcagtagtagtccatcccgcgcagacagtagtggcggcccgagcaagcactttcgtaaccatggaagggcaggcgg

SEQ ID NO: 3184 - DNA, 195 bp, Homo sapiens
atttttaccatgtgcgtattcaaccaaatttatttttgaacattcagaacaccagattatcacagattaaaaagaaagcaccaaaaattactacacattaatacctgagcagagactgaaggcaaatattcatctattaaacctacaccataatgctcaaacacaggtaaaaacattcacaacacactctacaga

SEQ ID NO: 3185 - DNA, 277 bp, Homo sapiens
ttacaaatattttagcaaatgctttctatttctcttgcttgtgcatatcttggctggcgttacagaaaaatagtgtaaacattatttccttactggggaatgagggttttttctttttctttttttcttttttttttttttttttttagtttgtgtgtgggggtgggtaagggaggggatggtttatgttgaatgtttagtttttcttctgcatgatacgtcatgttgtgggatctttagaaaacttcatactgtatgaataagaaaataaaatatt

SEQ ID NO: 3186 - DNA, 342 bp, Homo sapiens
tttgaccaaagtcggtgctgcacttgacgcagtgtgttttaggtgtttgtctttgtacttttttgtgatttttgaatgcacgtgcgcaggaagggctcctcttagagaagcagtcaaactgtgaagcactaagctgaccctgcttcaagcaattttgtttttacaactgttcctttcacaagcaagccttaaaaaaaaagaaagacaacttcctttttcttcagctcccacaccccatttttcttagcagactgcagtcaatccacattcaatgaaaagtatataatgcccatttttatatgcacgtttttaaacttccaagttctgaaaattgtttactgg

SEQ ID NO: 3187 - DNA, 438 bp, Homo sapiens; identical to SEQ ID NO: 61

SEQ ID NO: 3188 - DNA, 395 bp, Homo sapiens
tttttttttgtagaaaattcctttattatagtgcaaattactttcagcagtgacataatgtaacaacacatttagcaacattttacaccacacagtaaataagaaagtgtttctttgaaaatatgtcatcataggaacattatttctacattaatgccagaaaatgccaaggccgtttatctcaaggcaaacagggctccctccttccttttgggtattttctttttaacacaaatgaaatgacttgccattttaacaaatcctcaattctaaaagtgatctctcagggggctttgaactaaggtcggcaagatttgaaatggggcttcaaaattttaaataataattttaaaatacttctggaatagcccaaaaagtagaagtcacttctatta

SEQ ID NO: 3189 - DNA, 323 bp, Homo sapiens
ttttttacagtcacatgaaaaataaacatctttatttttttgcctactttatttcattttttcaaataaaatttaaatctgtacaaagtatactgttacagtatatattttgtaagaatcaatgcctaaaataatcacaatacttcaataagcagtacagcagacctcgctagttttcagctttgatattgaacaaactcaagccggctgatgcacaacacgtttgcttggtttccacatggtgatttcccagcactgagatgggagaacatgacagcaaatatggtaatattacagcccgacacactgcgtttcttcatgtg

SEQ ID NO: 3190 - DNA, 378 bp, Homo sapiens
tttttttccagcaaaaaaatacggctttattggatctatttcctaactacaaagacagctgacacagacatcaaacgtttccttttcaatgacagtcccctgagaaaggctgcacgtgactcctacagtgccgggtgcagggtacccagccgcaggtgggacgcggccacacgtcttcacggttacgtgcagaccgacgggatggccttcaggttgtttctttccgtgagtgagacacaagagacgcgattgtgccggagcgcacggtacaggccgttccttctgcgggaccctttctccatcagcgacgttctgttcagtgacttcacagccggagcctccacccgcagtgcaattcaggcaggttccataaggggg

SEQ ID NO: 3191 - DNA, 586 bp, Homo sapiens
agaataaaccaggcctgtttcttttcccctgaaatccctgcctctggttcctaaacccatcatctaaggtgacagagcagtgctggaatagcatctcctttcactttcccaaaactgccacagatagctgccactggatgctctttgattcctggaagcaaacgtgggactgtcggaggaaagggattgttctggtcttactcataactgggtggtttgagggtgactgaagtcgtgcttttcctgtgtgtgctgccagcacagggctgtaaatgcagatattgcgcctgtgtgcgtgtgtataagtcaagctccaagaggctcctgaatgtgactggcgtgctgagaatgtgtttacgctgtttaatgtctgccaggtgagggttacactgaagatgcacaatccctaaaataaagatcaccacttccccaaagaagcagccctcgggtccatgtgttgttcagacatgtgaagagaagcaagacagagggtctcagatggacgagggctctccaagggaatgcctggggattcacccagtggtccccagaggtgctccatggaggcaacaagtcattccatgaa

SEQ ID NO: 3192 - DNA, 328 bp, Homo sapiens
cacttgacaattttatgattaaaaccaacaaatggaaaacagacagtgttgggtgttgctgacataatcaagcatttcgtgcggacccactcaaccaccccatttcttggatctatttctggatgtaccaaatgtgtctgaagatgaactcactttcgcacatcaaagatgtatccagtgttaaacaccggagccagaacccaggtgaaaatctgctggttcagggcaacaccacttccggctttattaaacactcaaaagtcaggttcccaagaaacgcttggatctatgcgcaagtataacatgtcaaaactgttaaatgtgacca

SEQ ID NO: 3193 - DNA, 495 bp, Homo sapiens
ggatttgcaaatattttaattcacagaaactcaaggagagggtgggggtgggggctggggtggtgtgttgccgcccttctgtctttatccaggccttctccagcccccgtaagtggcaacagcattctagagacatgcagtggtgtgctagtaccatacacacaacacaaacgacacagccagcaacagtggctgggctggttggtggggggcctctggacctccaagtctcaggctctgtcacagagcagggcaggtctggtccgctcacagggtcctcacagccacgggatagaggagggacaagtgctcagcccctttgatgggtagctttctggtggtgtagtagtggatgacttccgggacactgtcgaacggagggctgttctgacccagaacgtatttctctttggttttggccagtttcatgtgcataaaaccctggttgctcctcagggagagggagtagtcatgcttgctggtctgggctgtccg

SEQ ID NO: 3194 - DNA, 378 bp, Homo sapiens; identical to SEQ ID NO: 1720

SEQ ID NO: 3195 - DNA, 365 bp, Homo sapiens; identical to SEQ ID NO: 2844

SEQ ID NO: 3196 - DNA, 306 bp, Homo sapiens
acttgagaagtcaaacagttttattacagaactatgtgtatatattttgggtttaaaacttgccaatagctgtttgaaaggatagctcataatttattcaaatagatattttattaatcaaatgtttttggtttatcaacataaccaaatgtataaaaaatgtttttaaatacaagacataactataaagtcatgaggctgattgaccttttaaactaacataataaaatctatatggtcaaaatgagtggtgatgctttaaggtaatgattatgcgtcccatctaaggatgctgcaatggcctag

SEQ ID NO: 3197 - DNA, 190 bp, Homo sapiens
tgggcaccattaatacctaggacaggtgaaagggtccagaaagacaccattggtaatggccgattgccggctgcagtcatcgcccccagatcaggctggtacaggatgccttaaggtgatgagaggtgagggtgcatgaagaataatgagcacagggaagagagaagcaggacaaagtagcagataaaat

SEQ ID NO: 3198 - DNA, 288 bp, Homo sapiens; identical to SEQ ID NO: 2132

SEQ ID NO: 3199 - DNA, 208 bp, Homo sapiens
ttttatttttttttttttttagagtttgattgcctttattatgaatataaaatgtacatacaatacaatatacatttatacatttacagtttgcatttcctttcatcttttttgagcaaattcaattctgcatgtcccagtttgccgctccttccactgatttgcacttacactcatgacgttctcttcacttgggtactctgtgtac

SEQ ID NO: 3200 - DNA, 360 bp, Homo sapiens
ttctgtgcaaatgctttaattggtggattcttagatacagtggttaatccattgcccacaattctttactaattccgaggcacctcatgccgggaacacactttcccttccactaaacaaaggtgaccgcgtttcagagctctcctcttacaaggttcacgtccttcgttaggccgaggaccgtggtactacaaaagaacatttcgttagctgaagtcactacgattggcgagaaacatccgttacttcagaatacgttaactacaaaatatattgaatttccatatgtattaaccatatacatgtgtaactattactaaatgtagttcagtcattacaaaataagacattctgggagcg

SEQ ID NO: 3201 - DNA, 155 bp, Homo sapiens
ttttttttttttttttttttttttttttttttttttttagccacaaaacattttatttacaaaatatatactgaatactatacatctggccccatcaccatggaaacaactccaaagcctgcctggggatttgtgcccaagcccagcccaggagg

SEQ ID NO: 3202 - DNA, 385 bp, Homo sapiens
tttttttttttttttttttttaagtttgtctggtttatttgcaggctgttagagatgatatcccagtccacgcacactcccatgcacacgcacacacatacttcatccacctgaatttgcccgacaaaccctcctctgagtcatagggacaaagccatacttggcagtcctcacgttactggttacattagatttggtctttcagaaagaagatggttgaagtcccaagaagctgagcccttagccagagaagtaagagtcctagaaccaagagccacaacctgaaaagatgcagattgcccccgccttccttccagggacaactcttgagaccctctcctcccaggagttgagtctcaagaaatgaagggactgatggggtttc

SEQ ID NO: 3203 - DNA, 311 bp, Homo sapiens; identical to SEQ ID NO: 641

SEQ ID NO: 3204 - DNA, 373 bp, Homo sapiens
tttttgtttttttttttgacccagaaaagcactttaatttttttttcttggaggcataatttagtcatctcacctaaagcacttttcactttatctctggcaaccaagggttacagaaaactcagcaccaaaggatgaaaggggaacttgtccccttcggtccccagccctgccctcccctgcagcctaaaataccctttctatgatcacagaacaaagttcacactcaccacacagccattctcacacacactcgcacaaaaagaaaaccaaagcccactaaagcacatggggaaaaaaagattacaaaacatcttcctccccatccggccttgagaccagactccctggctggagaggtcgtgacttccgc

SEQ ID NO: 3205 - DNA, 6651 bp, Homo sapiens; identical to SEQ ID NO: 79

SEQ ID NO: 3206 - DNA, 1364 bp, Homo sapiens; identical to SEQ ID NO: 2016

SEQ ID NO: 3207 - DNA, 393 bp, Homo sapiens
  misc_feature (1)..(393): n=a,t,g or c
gatcccagtgacgtggaagtcatcagaaccccacggtacttggagtacctctctgcaccaagatagctggctgattttntgctcagtcacaattttacttgaaagcaaganttgtcctagctccttttccattattccaaaacgtttaacgttcaaagcagggtctcattaaaaaagaaactactggttgatataatngagatattacaatttcagaataaacatttgattaaaaataaggaaatcctcagttcatactgtatttaaaagaganttggtaacttgantgtgtgtaattttttggaacctgtctaaaaaccanatacccctgcaancngatacagcccncccnnttctntttanntnttttgctgtgttattngntnggagntt

SEQ ID NO: 3208 - DNA, 444 bp, Homo sapiens
caaatgtatgamcttgtttaagatagccaggmaggcagtggtaggataaacacaagggataggmatgtatcaaaaaacagattaacacacacgcacgcccgcacacacacacacacacacacacaaaacctgtacaaaatgctccaatcaatgagaacagaaaaaagaaatcttcaactatgttacagtttaaaagcagaaaaaaaaagttagggagtttctccctcccacatgtcaggaaatgtcatccaatattcttaaagcaaggataactaaataaaatacatgtscagcatattctgcaattccgttacatacagtagttttttttccaaagctatttttttttagtatcgttaatataaagcagttgcacaaaaagcaarggtgttttgcaaacaggtgtatgcatttttcctttttaggacawtatctaamaaagmc

SEQ ID NO: 3209 - DNA, 440 bp, Homo sapiens; identical to SEQ ID NO: 2988
  misc_feature (1)..(440): n=a,t,g or c

SEQ ID NO: 3210 - DNA, 187 bp, Homo sapiens
  misc_feature (1)..(187): n=a,t,g or c
gatccaatactatttagtttattattgaaattggaaggattcattgagcagcatagaagtttgtttacatgttactttgagatgctaggtatttgtggaattaaaaagaatcaggctcttttgtactnantttttaaatctgtgatgcttntcaaatttaattcataataaattgatgcaatttcat

SEQ ID NO: 3211 - DNA, 1971 bp, Homo sapiens; identical to SEQ ID NO: 651

SEQ ID NO: 3212 - DNA, 419 bp, Homo sapiens
ctcttgacgactccacagataccccgaagccatggcaagcaagggcttgcaggacctgaagcaacaggtggaggggaccgcccaggaagccgtgtcagcggccggagcggcagctcagcaagtggtggaccaggccacagaggcggggcagaaagccatggaccagctggccaagaccacccaggaaaccatcgacaagactgctaaccaggcctctgacaccttctctgggatcgggaaaaaattcggcctcctgaaatgacagcagggagacttgggtcggcctcctgaaatgatagcagggagacttgggtgaccccccttccaggcgccatctagcacagcctggccctgatctccgggcagccaccacctcctcggtctgccccctcattaaaattcacgttcccaccctgaaa

SEQ ID NO: 3213 - DNA, 1021 bp, Homo sapiens
aaatgaaaaaaaataatagttcactcaaacacaacttccgggttgaaggttcaacgattctcctcctcacctccaagtactgggactacagacatgcaccacacacccagctaattctgcatttttagtagagaaggggtctcaccatgttgcccaggatggtctggatctcctgaccttatggtccgctcgcctcggcctcccaaagtcctgggattacaggtgtgacccaccgcgcctggcccaaagtgctgggatgacaggcgtgagacaccatcctgccccacagaaaagatctgagatgggacagcccccgcagatcaggacgtgggctctgttatctggggggtgaccgactcaccctgcctcctctcgtctctgcaggtggtctgggaggcgggcaaagccggcctggaggagtgtctggtgactgaagtacaggtcgtgcagaaaacttgagactggggttcagggcttgtgggggtctgcctcaatctccctggccgggccaggcgcctgcacagactggctgctggacctgcgcacgcagcccaggaatggacattcctaacgggtggtgggcatgggagatgcctgtgtaatttcgtccgaagctgccaggaagaagaacagaactttgtgtgtttatttcatgataaagtgatttttttttttttaacccactcactggtcccggtctctggattcagccccattcctccaacactactagagagactgtttccccggttttttttttggggagatggagtcacgatctgtctcccaggttggagtgcagtgatgcaatctcagctcactgcaaccgctgcctcccgggctcaagcaattctcctgcctcagcctcccaagtaggtgggattacaggcacctgccaccacccctggctaatttttatattagcggtctcgaactcctgaccttgtgatctgcccgcctctgcctcccaagtgctgggattacaggggtgagccaccacacctggccttttttctttaaa

SEQ ID NO: 3214 - DNA, 2383 bp, Homo sapiens
aaaaaaaaaaaaaaaaaaaacaccagtttttccaacatctaattgagcttttgattaattccgtgtaccagattctactgaagaaaggtagccatggaagagaatatggaagagggacagacacaaaaagggtgttttgaatgctgtatcaaatgcctggggggcattccctatgcctctctgattgccaccatcctgctctatgcgggtgttgccctgttctgtggctgcggtcatgaagcgctttctggaactgtcaacattctgcaaacctactttgagatggcaagaactgctggagacacactggatgtttttaccatgattgacatctttaagtatgtgatctacggcatcgcagctgcgttctttgtgtatggcattttgctgatggtggaaggtttcttcacaactggggccatcaaagatctctatggggatttcaaaatcaccacttgtggcagatgtgtgagcgcttggttcattatgctgacatatcttttcatgttggcctggctgggagtcacggctttcacctcactgccagtttacatgtacttcaatctgtggaccatctgccggaacaccacattagtggagggagcaaatctctgcttggaccttcgtcagtttggaattgtgacaattggagaggaaaagaaaatttgtactgtctctgagaatttcttgaggatgtgcgaatctactgagctgaacatgaccttccacttgtttattgtggcacttgctggagctggggcagcagtcattgctatggttcactaccttatggttctgtctgccaactgggcctatgtgaaagacgcctgccggatgcagaagtatgaagacatcaagtcgaaggaagagcaagagcttcatgacatccactctactcgctccaaagagcggctcaatgcatacacataaatgcatcttcctgttctttctaccatttgaatgcattggtgtttaactaagggccatccaaccatccaacctttaaaaaacaaaacgaaagtgcttctcatcaatgatatgtaaggtgacttatgaatcacctgagtacaattctttgttgtttagcacttaaatttcccaatttattaaattgatgtaaatcagatcttttctacaagctcctatccagccttttttttgaaatttctcaaactcatttactagttctgtaaaatcaaagatactaacattgtcaaatgcaaagatttgtttgatttttaaccacttcccatgtgttatacataacaccttttgcattatgtcttatgttttgaaaagaaaatagccttttatactttttagttttgatttcggtaactagtttaactacaggtaaccttcaaaggaccattgtacattatgaacaatagatagagattacatcttgatgactcttgaaatatggaaattttgtctgaagatcagtggccatattactgtaggccctggttcatgttttcatcaatctaaggtgcaatttctaaatttgtaagagtaggtttaaaaaaaaaagtgcttcttatctttgttaacattgtacttttccttgatgttcttaaaaggtatttccctcagattactcatgtttatgttgtgagcatgtagaaacagtaatgctaatgcatggctagttgcctttttaagattgtgacaccaggcttaccttttaaagtttagtatatagagacaattttaatggaaataactactgtagactattgaagaatgatctctttgtgatttaagaagtggctggattggaacttttaatatgctaatgtggaaaattaattacctttatgaaggtggtttattacaaataagcacactaacccctcggaagttgttttacctactttaaaagttttaatggattgcacctctgtaaactattcctaaaatgtgtatgatatatttgaaaaggcttccattaatataatagctttgcttgcagccttccaatctatgttggtttacctgtagtgttttataaagtgtggtcagagggccctatagaatgtattgtttgaaagtgtagtgatatatttgtgtttttatttcaagtaagtcattttaaccgaatgttcattcatattcatttataaaaagtacctgtatcaaaggaattttaacaaagagcaatcagtattattggaccaaatttggtgtttgttttcaccttgacgctcttcttttcattatttctaatgctacaagaatgctgtaaagtgtcttctaaaatgatgtagcctgacaagacatttttttcagtgtataaaactaggtagtattgtgcactgatttgaccattgtgaaatcctttctcagtgtaactgcatttctaataaaaatttattgagtg

SEQ ID NO: 3215 - DNA, 403 bp, Homo sapiens
aaaggacaaccacaagtttattccatccatgtgaaataaaactcacatcaacattttaacttagttgtgtgtagatatatacaagtgtgagaaatttgacagctgrgtcaaatgtacaacttaggraaaaaaatwttaccaaactacttgtaagaaaactatcttccctgtatcataaggtactgaacatctgsggvacgrgctcgtscsaattcctgcagcccgggggayccactagttctagagcggcccccaccsggkggagctccascttttttycccyttagkgagggttaatttcgrgcttggggaatmatgggmaaagcttttyccbkkkaaattttawcccghhaaattccaaaaaaawggsccggagraaaaggdaagscgggggccaatrgga

SEQ ID NO: 3216 - DNA, 215 bp, Homo sapiens
ggtatgggaagaagttctttattttatcatgtgacaccacataacagatgcctaaccacacaatgtagatatgaataaagaagatggctcagaagagtgtactagtatttstsactcagctagtgaccattatgataaaaagaataaagttttgacttatttacagttttaaaatgcattttatattgagtagttatttcatgttttcttaaaac

SEQ ID NO: 3217 - DNA, 223 bp, Homo sapiens; identical to SEQ ID NO: 1869

SEQ ID NO: 3218 - DNA, 460 bp, Homo sapiens; identical to SEQ ID NO: 1681

SEQ ID NO: 3219 - DNA, 3198 bp, Homo sapiens
ttgggaggagcagtctctccgctcgtctcccggagctttctccattgtctctgcctttacaacagagggagacgatggactgagctgatccgcaccatggagtctcgggtcttactgagaacattctgtttgatcttcggtctcggagcagtttgggggcttggtgtggacccttccctacagattgacgtcttaacagagttagaacttggggagtccacgaccggagtgcgtcaggtcccggggctgcataatgggacgaaagcctttctctttcaagatactcccagaagcataaaagcatccactgctacagctgaacagttttttcagaagctgagaaataaacatgaatttactattttggtgaccctaaaacagacccacttaaattcaggagttattctctcaattcaccacttggatcacaggtacctggaactggaaagtagtggccatcggaatgaagtcagactgcattaccgctcaggcagtcaccgccctcacacagaagtgtttccttacattttggctgatgacaagtggcacaagctctccttagccatcagtgcttcccatttgattttacacattgactgcaataaaatttatgaaagggtagtagaaaagccctccacagacttgcctctaggcacaacattttggctaggacagagaaataatgcgcatggatattttaagggtataatgcaagatgtccaattacttgtcatgccccagggatttattgctcagtgcccagatcttaatcgcacctgtccaacttgcaatgacttccatggacttgtgcagaaaatcatggagctacaggatattttagccaaaacatcagccaagctgtctcgagctgaacagcgaatgaatagattggatcagtgctattgtgaaaggacttgcaccatgaagggaaccacctaccgagaatttgagtcctggatagacggctgtaagaactgcacatgcctgaatggaaccatccagtgtgaaactctaatctgcccaaatcctgactgcccacttaagtcggctcttgcgtatgtggatggcaaatgctgtaaggaatgcaaatcgatatgccaatttcaaggacgaacctactttgaaggagaaagaaatacagtctattcctcttctggagtatgtgttctctatgagtgcaaggaccagaccatgaaacttgttgagagttcaggctgtccagctttggattgtccagagtctcatcagataaccttgtctcacagctgttgcaaagtttgtaaaggttatgacttttgttctgaaaggcataactgcatggagaattccatctgcagaaatctgaatgacagggctgtttgtagctgtcgagatggttttagggctcttcgagaggataatgcctactgtgaagacatcgatgagtgtgctgaagggcgccattactgtcgtgaaaatacaatgtgtgtcaacaccccgggttcttttatgtgcatctgcaaaactggatacatcagaattgatgattattcatgtacagaacatgatgagtgtatcacaaatcagcacaactgtgatgaaaatgctttatgcttcaacactgttggaggacacaactgtgtttgcaagccgggctatacagggaatggaacgacatgcaaagcattttgcaaagatggctgtaggaatggaggagcctgtattgccgctaatgtgtgtgcctgcccacaaggcttcactggacccagctgtgaaacggacattgatgaatgctctgatggttttgttcaatgtgacagtcgtgctaattgcattaacctgcctggatggtaccactgtgagtgcagagatggctaccatgacaatgggatgttttcaccaagtggagaatcgtgtgaagatattgatgagtgtgggaccgggaggcacagctgtgccaatgataccatttgcttcaatttggatggcggatatgattgtcgatgtcctcatggaaagaattgcacaggggactgcatccatgatggaaaagttaagcacaatggtcagatttgggtgttggaaaatgacaggtgctctgtgtgctcatgtcagaatggattcgttatgtgtcgacggatggtctgtgactgtgagaatcccacagttgatcttttttgctgccctgaatgtgacccaaggcttagtagtcagtgcctccatcaaaatggggaaactttgtataacagtggtgacacctgggtccagaattgtcaacagtgccgctgcttgcaaggggaagttgattgttggcccctgccttgcccagatgtggagtgtgaattcagcattctcccagagaatgagtgctgcccgcgctgtgtcacagacccttgccaggctgacaccatccgcaatgacatcaccaagacttgcctggacgaaatgaatgtggttcgcttcaccgggtcctcttggatcaaacatggcactgagtgtactctctgccagtgcaagaatggccacatctgttgctcagtggatccacagtgccttcaggaactgtgaagttaactgtctcatgggagatttctgttaaaagaatgttctttcattaaaagaccaaaaagaagttaaaacttaaattgggtgatttgtgggcagctaaatgcagctttgttaatagctgagtgaactttcaattatgaaatttgtggagcttgacaaaatcacaaaaggaaaattactggggcaaaattagacctcaagtctgcctctactgtgtctcacatcaccatgtagaagaatgggcgtacagtatataccgtgacatcctgaaccctggatagaaagcctgagcccattggatctgtgaaagcctctagcttcactggtgcagaaaattttcctctagatcagaatcttcagaatcagttaggttcctcactgcaagaaataaaatgtcaggcagtgaatgaattatattttcagaagtaaagcaaagaagctataacatgttatgtacagtacactctgaaaagaaatctgaaacaagttattgtaatgataaaaataatgcacaggcatggttacttaatattttctaacaggaaaagtcatccctatttccttgttttactgcacttaatattatttggttgaatttgttcagtataagctcgttcttgtgcaaaattaaataaatatttctcttacctt

SEQ ID NO: 3220 - DNA, 6465 bp, Homo sapiens
gagatcagcgctgggacggaacccgggttcctctcgaaccgggattgtgacgcttttggcctggctggccgctgttttctgtcccactttttactcgggcctgcgtccgctgccgccgtccctcagtttgcccccggaggaggcagggcggccgtgccttctgccgtgcgcccgcgtggctgccaccgcccctccgaatcctccggggccgcagaggggttcgctacggagggaggtgggggccttcgggaggaggaggcggaggaggcggaggaggagggaaggaagatggcggccgtggaactagagtggatcccagagactctctataacaccgccatctccgctgtcgtggacaactacatccgctcccgccgagacatccgctccttgcccgagaacatccagtttgatgtttactacaagctttaccaacagggacgcttatgtcaactgggcagtgaattttgtgaattggaagtttttgctaaagtactgagagctttggataaaagacatttgcttcatcattgttttcaggctttgatggatcatggtgttaaagttgcttcagtcttggcctactcattcagtaggcggtgctcttatatagcagaatcagatgctgcagtaaaggaaaaagccattcaggttggctttgttttaggtggctttctttcagatgcaggctggtacagtgatgctgagaaagtttttctgtcctgccttcagttgtgtactctacacgatgagatgcttcattggtttcgtgcagtagaatgttgtgtgaggttgcttcatgtgcgaaatggaaactgcaaatatcatttgggtgaagaaacatttaaattagctcagacatatatggataaactatcaaaacatggccagcaagcaaataaagctgcactctatggagaactgtgtgcactcctatttgcaaaaagtcactatgatgaggcatacaaatggtgcatcgaggcaatgaaagaaattacagcaggcttaccagtgaaagttgtggtggatgtcttaagacaagcttctaaggcttgtgtagtaaaacgtgaatttaagaaggcagaacagttaattaaacatgcagtgtatttggcacgggatcattttggatccaaacacccaaaatattctgatacactgctagattatgggttctacttactcaatgtagataatatctgtcagtctgttgcaatttatcaggcagcccttgacattagacagtcagtgtttggtggcaaaaatatccacgtagcaacagctcatgaagatttggcctactcttcttatgtccaccagtatagctctgggaaatttgacaatgcactatttcatgcagaaagagctattggtatcattacccacatcctacctgaagatcatcttcttttggcttcttcaaagagggtgaaagcacttattttagaggagattgcaattgattgtcataataaggaaactgaacagaggctgcttcaagaagctcatgatttgcacctgtcttcactccaactagctaaaaaagcttttggggaatttaatgtacagactgcaaaacactatggaaaccttggaagactttatcagtcaatgagaaaatttaaggaagctgaagaaatgcacatcaaagcaattcagattaaagaacaacttcttggtcaagaagattatgaagtagccctttcagtgggacatctggcttctttatataattatgacatgaatcagtatgaaaatgctgagaaactttatttgcgatctatagcaattgggaagaaactttttggtgagggctacagtggactagaatatgattatcgaggtctcattaaactttacaactccattggaaattacgagaaagtgtttgaatatcacaatgttctgtctaactggaaccggttgcgagatcggcaatattcagtgacagatgctcttgaagatgtcagcaccagcccccagtccactgaagaagtggtgcagtccttcctgatttctcagaatgtcgagggaccgagctgctgagggaggacctcagttaaccaattaccttttcccggattccagggaattcatactgtgaaatcaaaaccatgttgttttggggggctggaatttgcattgaaacactggtccagtccattgaagaccctattttgggtgatccctatcttgcagaatgtctgtaggaataagcatatattcagttatattcagcatgtaccgcatgtgtaagtagtctggcccacattttcaacctagtagaacaaacaacaggaaatcttttttttgttgtttttaaaaaattcattttgcagaaagcctgaaagaaaaaaaatacccctaaataaaactatttaagagtttaaaagagttgcattcttattatgtaaggatgattttaacaactttttaatatgtaattcttccatgtggaggtattcaatactgtagtgtaaagaaattttatgcggaaaatctttatatgcagtatagaaaagttaacacaagtactaataaaagagggacatcccgacttacgtttttctaccttgcccagataagtggatacaaccactctatattacaaggaaaggactgtcagattcatctgaactggaccagtgttgatctgtaatgtaatagaaaatctgatagaccagcacttctgacttttttttttggtacaacaatgcaagatgctctgatagcatttgctaacaggaccaggaggatctaaaaaggaccagcctaatgtagaaggtggttatttggaccagaggctttagattattattttagatcctacatatacttttatcagtagaatgatttcatttagatgtataatgaaaaaggataatgcaaaaattatgtaatagataccaaattagggaagtttggcaatttcaatggcatatttttagtcaaggtacacagatggcagtgccataagcaagtctataaatatcggctgcagccatccccctcattttaaatgttgccctaataatcaatgcagttaacaagtatattggctgtgtgtcatgaaatagttcatgttcagatggaaatgttaggttactgtatggtttatggagattaatgaaaatgaatgcccaaaaataagtcttagaaaatcctccatttttatggtaaatagtaatacaactaggtcatttcatttgaaatctaggagtcaaatggaaagatcccctaataatacacctatttcactaacttgtctttctgtttattgggttttgatttgattttttgtaagccagtcaggttatttaatgatgaggtaataatcaaatttaagaatttgtgacatgtagcaattcaagaaacaaaaaggtattttgctgttacctcaattcttactgtagtagcccatctgatgcttctatagttaagaatctgggttccccccctattttcaggggttcatgacttggctgttaaagatgttgctcctagctaatgcttggagtagtctgtgggtgaatggatgtgtgttgaattttagttttcttttaacatgcatgttgggtgagaggggaaaaaaatctaagctgtctgccacattgagtacagaaaagttgtagatttcaaattttattaatattttaagcacttttttgaacttcccaaccttgtttgaagctgttatttgcagtcctattagttttgagccattgcatttaagttccctaggagggggttggttgggggatgtactgaaagagatgaagcaaacccacaccctaagatggtaactgtgtgatttagaaacctgagtttactcctcaaatcgaattattttctttttaaattttggaaagagtaaattgacgtacttgcagtttatgaagctgccccccacccctcagttaattgcagtctaatgtcaagaggcacttctttattaattaccaaatagtctttgtgaccaaggactaacatttttaagttactcagctctatcctcatgggcctatatatttaatacctccaaagatattttcaggataggctttgtatacttttattggttatttagaatccagtggtatgtttgtggtataggaatgtcatggtaaattgtttttcaataaatattttgaaacatgtttccatatgaagtttttttttcaatctgtattttttggttttgtgcacatacagcatttcctaggataaaaataaacaaatgacttacagcctcatcctccctaactccatttgaactcaacttagctcacactcagtgataaaacaacatggtatgtagaagcctaggatcacagggtgataatgtcaattggcagccagttgtgtttttttgaaacatcattattggcagtttctccttatcaccactgctttaatgtagtttttttgtaaatccatatactttaatgcatacactctagcttaagaaaacattgccattttggttagggatatgacttaatgtgctattatttctggttctaatgaagaataataccctatgactttaagtgtaagattcatcctttaagtagggatgtttaggataagttagatgtgtgccactatgatttattgggtttcttaaaaatcttgaagaaaataataaaatttatctcacaataagttaacttgcgcaaactttttacatatggtgaggtgcgtaaggaagccctggccaacttaaagatttttctggaggttcagcaaagttatgttaaattaggggcctttggtctcatccttctctgactcttctacccagtcttttcctaaagttcggtgctactccagttgggtgcatcagggagctccgtcagcactcgcatgtgtcgctcaggtggccactcatgcctgcattccatttaatagagtcaattggaatttttagagcataatctttatggaccctcaaagctgactttgccaaagggattgagacccttactaccatcaaatctctgtctctgcttggttaaaaattggctcactattgctttgtagtaacccctgcccaggtattttttcacttgtgaaaataatttgagaaagacctttgttcctagcctgttgggaaaagtttataattttatgaaaattaagtacagaggctgcgatcttagaaataatgaaggtgccatttggctgctccttaatagtgcagacagaaaactgcagtgaacacatgccaaaacatgattgaagcctttggctgaaactttatacatagaaataatgatttgctcataacaggtatcattaactgccactttttatgttttccctagaatttgtagccttgctgcttgcttttcttctgggtggcaaagttactactggaaaaacactataagtacaaagtttttggggttttatctttgctttagaagtgggtgtgtacttcacctcttggctgtggaggaccttagttgccaggaaatttttttttttttttttcagacggagtttcgctcttgttgcccaggctgggagggcaatggcaccatcttggctcactgcaacctccgcctcccgggttccagcgattctcctgcctcagccttccgagtagctgggattacaggctcctgccaccacgcctggctaggaaattttttgttgttaatatgacatttggattaatctccagcttcaacagtacttcttttgtccataaatctcaggaatgttttaggcagaaaactggttttaccctgttgataatcagaaggagtgtgctttaggatttattgcataatactattctttaattgcaatcctaggtatctatagcatgagtggccttagtgagtttgttgaagtgcacatgtttttcaagagtaaaatttaagattaaaaatatatcctatatatagatatctagaaaacttggtttgtggtgcacagtcaagtgttggatcactaaataaccattgcaggtaccgtttgtgtaacattactcatttctgtatattccttttatgggaagatattttgccatggtaactaaaacttttcagttctacttttatgatgtgaatgaatgctacgttttattaaatattaccaggtcagtactatttttatactttattaagcaacaggggattttagtttaataggctcaaaataaaaagtttaatggaacagttaaaaacaaaacactaacaatctttacgtgaaaatccccactaatagtgccacaataatttctatagaaatatctaaggtcattaaatagatttttgaagacggttcttcattgtgtcaggatgacctttcatatcattctcaccaacttgtagtgcccaccgttatttgtaactattaaaccatactaagtatgtttgtaaccagcattgtgatatattctgtacttgtattgctaaaaatgaattattgacctaataaatatagtgttcctgc

SEQ ID NO: 3221 - DNA, 225 bp, Homo sapiens
cacattttagcagttaaacttttattttactgtttaaaatttttatttactttttttgtttttcttttctacaaaaggcaggtgatgattgttgatctgcaactattgtgttgtgcactccccgaaaggggcagagtaggaagccagggaaggtgctctgaggatgctttctaagggctgcaggacactcactggagggagtgtctgggcccttctcctgtcctc

SEQ ID NO: 3222 - DNA, 274 bp, Homo sapiens
ctgtatttctgttttatttagaaatgatttaaaaaacattatacaaaggctgatcagtttaaaatgtgactgacactgaaatgctgtgatgtcccccaggctgaggggaagctaggctctggggcccccagtgctttgcccctctgtctgccctgtcctggggtgatggacaaacagatgaccacaggcaggagaatctgagattggaagcctctaggctgagccctctgggcctggccccacatccctcacctctgcagcctgggctgcctgc

SEQ ID NO: 3223 - DNA, 309 bp, Homo sapiens
  misc_feature (1)..(309): n=a,t,g or c
gagactcaagccaggtttaatgatcattgtctagttttcagagcccagaggctccaagatttgccagcctaggtgtacacaagtgggaggaatggggtcttggacacgggaggcctgcttgctttgtcagcagagctacgaggaagtacagaggtaagaacacacagaaaactggatccatctgctttgctctccccagctggggtgtaccctctcctggcccctttcttnggccccataaatacaaaataataataataataataattacacagattgtagagccctgtcatcctctgtctccaggga

SEQ ID NO: 3224 - DNA, 318 bp, Homo sapiens
  misc_feature (1)..(318): n=a,t,g or c
catcacagagttaaaatatttaatgacaaaattagggtttgtngtaatagtgantcaatagagcaggtgttacttatctctgaattaaacaaaaattatatttgacatctcagngaacttctgangantaactgtatgacagacatcagtagtgtcacaatttctaaaattangngctaaacctatctttaatgccccttatttngagcatcctgtaaataattttaaatagatgcacaacctttgctagccacaaaagtagtattaaaacagttttcactgtaacttaagtctaacacgtaatctgaacttcttcag

SEQ ID NO: 3225 - DNA, 291 bp, Homo sapiens
  misc_feature (1)..(291): n=a,t,g or c
actttaccaaaatctgtctttattaaagtgaacaaaccattagngcactacccaaaacttaatgaatgatggctgcagttggctcggcttgcctactttaaatgaggcaaacatcagctcctagtgccattccccaccctcatgaccgcgtgccagaagtcatcatcttcacatttgtagacgttgttctagcggaagacaggctttgcagatttcggtgcttttagtgaactggtgttttccgtaaactttttctgagcagcaagggataagaattttttttcagaaatc

SEQ ID NO: 3226 - DNA, 298 bp, Homo sapiens
  misc_feature (1)..(298): n=a,t,g or c
ccattgttgttgaacgtttattgagctctaacaatgtgacaggtgccacacaaaacattagacacagtacctgcccagtgggnttacaatctaatctaaggacatgaatctttttttttttttaaagacagagtctcactctgtctaaaaaataataataataaaangcattttgaaattagtcgcggtcaatgcaattctactctttggaatccgtttagctaaatgaatgtngtgctcttgttgaatggaaacaggtgataggaaatgcctaccatttgactcaatatggataatc

SEQ ID NO: 3227 - DNA, 317 bp, Homo sapiens
  misc_feature (1)..(317): n=a,t,g or c
gccaacacagtgtgtcatgtttattgggctattcacaggtaagcttaaaatacaatgaaaagaaaagaccagacgtcatcaggaatgtcgagaaacaaaatatttagcatttcttagtttcaaatgttaccatttcattgcagctgaggaatataggccattcgttgacataactgcaatgggtgagacttatttttagccacaggaagcaaatacatttaaccaatgacttttaggacaggaagcaaaaaagaaaacaatattttcatgtagcacggacaagaaaatcatttatacaaattaaagtgatataaaat

SEQ ID NO: 3228 - DNA, 305 bp, Homo sapiens; identical to SEQ ID NO: 2145
  misc_feature (1)..(305): n=a,t,g or c

SEQ ID NO: 3229 - DNA, 243 bp, Homo sapiens
  misc_feature (1)..(243): n=a,t,g or c
ccagacaggaaatggcactttaatagttggggccagggtgacaggaccaagatggggctggcctgtntcagtnaggaagcctccctcttctgctgggacagggccttgcggcantcctcctccccgcctgaggtcctaggcctgccacaggcagcatgccggtnaggtcagtggcaggagccacccagaagccccgcagatgacggagctgagaacagggacttcacctccacgtgttgccat

SEQ ID NO: 3230 - DNA, 243 bp, Homo sapiens
ttttttttttactttaatttttcttttattttcactgacagaaaaattttctggagagtacaatcaagatagtgtattattagaaataacattaatagaagcttggtcagaaatgataatagtcataataagcatctctctcaccaaggcattccacacagagagatcacagcacaataaataaaggatttctcatttgccacacaacaaataaaacaattgcagtaacaaaaatatgacttt

SEQ ID NO: 3231 - DNA, 392 bp, Homo sapiens
  misc_feature (1)..(392): n=a,t,g or c
ttttttttttgctttaaagtctttattatcccgaatataaaagacagagtcctctaggatataacagagttctttacgtggaaacattatttttttacaagtgaaaaaataaatacctcttggaataaaggcttatatgctaatatgtgccataaaaaagtagagttttaatatttgacaaaatgtctgtgcaaagtaaacaaatgcataaacacattactgctacattaaggcaatatgaaaagtatactcaggaaatctcagtaaagtgacagtgtaggtttctaggctttaccttaggctagtattgcacccgntaaggtcatctagggtctcccgacatcccagaaaacctgctaggcttgaccagctttccaaaatggccccaagtt

SEQ ID NO: 3232 - DNA, 462 bp, Homo sapiens
  misc_feature (1)..(462): n=a,t,g or c
tgaacatgatgctaaccctgacaggatgaaggaaagtaatattctttcagtgtagttcaggagagcatttgttttcttttctaccaattaacccatcattgcttttaaacaaccatctnaaggagcagagaggcagggtagaagacagaagggggatctatgtggtaactaaagaatgtttctgttttgttaattattgtgtgtgtgtggttttattgtttgcttaagagaatcaaaaactgaaaaaaatgagaatacaggaaatggctcttgtttatttttttgctgtgtttacagcttgttaatgctctactgtctttgtttcaagagagaattgntcactgcccagctcgctttgtgtccngagccctatggccaggccaccntgattaaatcatggcngtttaggatgtttganttttggacccgtttngccattggttatcnttaaaggngtaaaaa

SEQ ID NO: 3233 - DNA, 476 bp, Homo sapiens
  misc_feature (1)..(476): n=a,t,g or c
tttttttttttttctggtttaaggatactttattattgaaccagtatgtacaaactctaacatgaaaataatgagtcacagaatatcaagactatttacaatacttttttgttttttacaaaacatttttacaagattacttctctctaaataatgtgacagacatacacaaaaatccaactttttttattacatacataaataaatattgactttaaatgaccactgtaagggacatgaattctacagaccacttggatgagaaggtagcagttttgttatctgcacactacaatataattaagtaaaggggaaaagtaactttatatagacctctgttaatcactccgtaaatcatataactcactaggaatattcagtaggaggtaaggacagtcatgaggattcctctccgtaccngacaccgngtctggacctggcaaattcacaggtaagggtccacctctttntatatc

SEQ ID NO: 3234 - DNA, 414 bp, Homo sapiens
  misc_feature (1)..(414): n=a,t,g or c
tttttatgttttttggtaattttttatttagatataatgccacgtttatagaaaagttgcaggaatcgtacaaaaaactcccatacaacttttcaccaagattatatacattcccctcatttgttttgtgtatatgctaatacatcacaaacacacaaaatactttttgaattctgattgaattataaactttttgagtacagattgtaagcaaattgaggtctgctgaaatgtttgatcaagactacattccatttcatgcttttacattttctttatttctattatttccccataataagagttcgggttccagaaagaaaaatgtatttacattttttttccttggtaggtggtggacttaacttcatatatttgtgggggggtggtaacnatactttctccagggncctg

SEQ ID NO: 3235 - DNA, 333 bp, Homo sapiens; identical to SEQ ID NO: 2862
  misc_feature (1)..(333): n=a,t,g or c

SEQ ID NO: 3236 - DNA, 363 bp, Homo sapiens; identical to SEQ ID NO: 129

SEQ ID NO: 3237 - DNA, 3202 bp, Homo sapiens
ctgagacaccgcagcttccctgagcgccgagtccctccggggacagcagcagggagcgcccgcgcagccaccgagcctctgcccagccaagccgccgtcgccgcgccgggggaccgccagccatggccgcgccgggggatccgcaggacgagctgctgccgctggccggccccgggtcccagtggctcaggcaccgaggggagggggagaacgaagcggtgacgccgaaaggggccacgccggcgccgcaggctggggagcccagcccggggttgggcgccagggcccgggaagcggcgtcgcgggaagccggctcgggccccgcccggcagtcgcccgttgccatggaaactgcatccacaggtgtggcaggtgtttccagtgccatggaccacaccttctcaacaacatcaaaagatggggaaggatcgtgttacacatctctcatttctgacatctgctatccacctcaggaggattctacatattttactggaattcttcagaaggaaaatggccacgtcaccatttcagagagccctgaggagctgggtacacccggcccctccttaccagatgtgcctgggatagagtctcgtggcttatttagttctgattctggaatagagatgactcctgcagagtccacggaagtgaacaagatcttagcagaccctctggaccagatgaaagcagaggcctataaatacattgacataaccagacccgaggaggtgaagcaccaagaacaacatcaccccgagctggaagataaagacttggactttaagaataaagacactgacatctcaattaaacctgaaggagtccgtgaacctgacaaaccagctcctgtggagggaaaaatcatcaaggaccatttattggaagaatccacatttgctccatacatagatgatctctctgaagaacagcgcagggctcctcagatcaccacccctgtcaaaatcacactgacggaaatagaaccttctgttgaaaccactacccaagagaagacccctgagaagcaagatatatgtctaaagccaagtcctgacacagtccccactgtcactgtctcggagcctgaagacgacagcccaggatctatcacccctccatcttctggaacagaaccatctgctgcagaatcccaggggaaaggcagcatctccgaggatgagctgatcaccgccatcaaagaagcaaagggattatcgtatgaaaccgccgagaacccacggccggtgggccagctggccgacaggcccgaggtcaaggccaggtccggaccgccaaccatccccagccccctggaccacgaggccagcagcgcggagtcgggggactcagagatcgagctggtgtccgaggaccccatggccgcggaggacgcgctgccctcaggctatgtgagctttggccacgtgggcggcccgccgccctcgcccgcctcgccatccatccagtacagcatcctgagggaggagcgcgaggccgagctggacagcgagctcatcatcgagtcgtgcgacgcctcctcggcctcggaggagagccccaagcgggagcaggactcacccccgatgaagcccagcgccctggatgccatccgggaggagactggcgtccgggccgaggagcgtgcgccaagccggcggggcctggccgagccgggttccttcctcgactacccctcaactgagccccagcctggccccgagctgccccctggagacggagccctggagcctgagacgcccatgttgccacggaagcctgaagaagactcgagttccaaccaaagtcctgcggccacaaagggccctgggcctctaggtcctggcgccccgcccccactgctgtttctcaataagcaaaaagctattgacctgttgtattggcgggacatcaagcagacgggcatcgtgtttgggagtttcctgctgctgctcttctccctgacccagttcagcgtggtgagcgtcgtggcctacctggccctggccgcactctcagccaccatcagtttccgcatctacaagtctgttttacaagcagtgcagaaaaccgacgaaggccaccctttcaaggcctacttggagcttgagatcaccctttctcaggagcagattcagaagtacacggactgcctgcagttctacgtgaacagcacacttaaggaactgaggaggctcttccttgtccaggacctggtggattccttaaaatttgcagtcctgatgtggctcctgacctacgttggcgctctcttcaatggcctgaccctgctgctcatggctgtggtttcaatgtttactctacctgtagtgtatgttaagcaccaggcacagattgaccaatatctgggacttgtgaggactcacataaatgctgttgtggcaaagattcaggctaaaatcccaggcgctaagaggcacgctgagtaaactgatttcccaccggggactggacacaaacaggaatgtctggagtggtaacagctctcttcttactcattactgcaaattgattgtctttcccccctccctccagtaccataatcttagagacaaaccttaaaacagctgtttttaggctgttccttgtactcttaggatatttgagtcacttgtgtcaaccactaaagtatagagaaaagtgtattagatgtggtttttaattttgtgttgctaaaaaaagtgcatgatggtgagagcccaagttatctttccctcttcggtgttcttcttctcttctctgcaatgcttctgtagcttctaatgttccccgtggctaggcctttcctgccgagtgctctgatgcaatagtggaaatcgcttatatgtccttgggttgctggttggattaatctttaataacaatatatagaattgtagactgatgttttagcatttttccaacacacacaacgtaaaaataaaagcagtcgaccgcacttatggtaatcagttttgtataacttaaaataattaaataaatgaataaatccaaaacaaacatgcagtacttttgttgtatgggattggtgggctgatttacatgtatggttactaaaaagtaccagcatgttaactttattacaatttgtattactttctctgtagttcctaatggattcaattacggactctggatatttgcacttatgtacttgatactgaatgcataaataaat

SEQ ID NO: 3238 - DNA, 2595 bp, Homo sapiens
cgggctgggcggttccgcggcctgggcctaggggcttaacagtagcaacagaagcggcggcggcggcagcagcagcagcagcagcagcaatctcttcccgaacacgagcaccacaggcgcccgaaggccggaacaggcgtttagagaaaatggcagacgatattgatattgaagcaatgcttgaggctccttacaagaaggatgagaacaagttgagcagtgccaacggccatgaagaacgtagcaaaaagaggaaaaaaagcaagagcagaagtcgtagtcatgaacgaaagagaagcaaaagtaaggaacggaagcgaagtagagacagagaaaggaaaaagagcaaaagccgtgaaagaaagcgaagtagaagcaaagagaggcgacggagccgctcaagaagtcgagatcgaagatttagaggccgctacagaagtccttactccggaccaaaatttaacagtgccatccgaggaaagattgggttgcctcatagcatcaaattaagcagacgacgttcccgaagcaaaagtccattcagaaaagacaagagccctgtgagagaacctattgataatttaactcctgaggaaagagatgcaaggacagtcttctgtatgcagctggcggcaagaattcgaccaagggatttggaagagtttttctctacagtaggaaaggttcgagatgtgaggatgatttctgacagaaattcaagacgttccaaaggaattgcttatgtggagttcgtcgatgttagctcagtgcctctagcaataggattaactggccaacgagttttaggcgtgccaatcatagtacaggcatcacaggcagaaaaaaacagagctgcagcaatggcaaacaatttacaaaagggaagtgctggacctatgaggctttatgtgggctcattacacttcaacataactgaagatatgcttcgtgggatctttgagccttttggaagaattgaaagtatccagctgatgatggacagtgaaactggtcgatccaagggatatggatttattacattttctgactcagaatgtgccaaaaaggctttggaacaacttaatggatttgaactagcaggaagaccaatgaaagttggtcatgttactgaacgtactgatgcttcgagtgctagttcatttttggacagtgatgaactggaaaggactggaattgatttgggaacaactggtcgtcttcagttaatggcaagacttgcagagggtacaggtttgcagattccgccagcagcacagcaagctctacagatgagtggctctttggcatttggtgctgtggcagatttgcaaacaagactttcccagcagactgaagcttcagctttagctgcagctgcctctgttcagccacttgcaacacaatgtttccaactctctaacatgtttaaccctcaaacagaagaagaagttggatgggataccgagattaaggatgatgtgattgaagaatgtaataaacatggaggagttattcatatttatgttgacaaaaattcagctcagggcaatgtgtatgtgaagtgcccatcaattgctgcagctattgctgctgtcaatgcattgcatggcaggtggtttgctggtaaaatgataacagcagcatatgtacctcttccaacttaccacaacctgtttcctgattctatgacagcaacacagctactggttccaagtagacgatgaaggaagatatagtcccttatgtatatagctttttttctttcttgagaattcatcttgagttatcttttatttagataaaaataaagaggcaaggatctactgtcatttgtatgcaatttcctgttaccttgaaaaaataaaaatgttaacaggaatgcagtgtgctcattctccctaaatagtaaatcccactgtatacaaaactgttctcttgttctgccttttaaaatgttcatgtagaaaattaatgaactataggaatagctctaggagaacaaatgtgctttctgtaaaaaggcagaccagggatgtaatgtttttaatgtttcagaagcctaactttttacacagtggttacatttcacatttcactaatgttgatatttggctgatggttgagcagtttctgaaatacacatttagtgtatggaaatacaagacagctaaagggctgtttggttagcatctcatcttgcattctgatcaattggcaagaaagggagatttcaaaattatatttcttgatggtatcttttcaattaatgtatctgtaaaagtttctttgtaaatactatgtgttctggtgtgtcttaaaattccaaacaaaatgatccctgcatttcctgaagatgtttaaacgtgagagtctggtaggcaaagcagtctgagaaagaaataggaaatgcagaaataggttttgtctggttgcatataatctttgctctttttaagctctgtgagctctgaaatatatttttgggttacttcagtgtgtttgacaagacagcttgatatttctatcaaacaaatgactttcatattgcaacaatctttgtaagaaccactcaaataaaagtctcttaaaaaggcc

SEQ ID NO: 3239 - DNA, 655 bp, Homo sapiens; identical to SEQ ID NO: 139

SEQ ID NO: 3240 - DNA, 2069 bp, Homo sapiens
ctatcaatctccagagctttttctttttaagtgtgagcgagtttattagagaagtaaagagacccaagagtgcctactccatagacagagcagccactgtgacactgtacccattaaacactaactctccattgcccctccagcaacccctagcacccactgtctactttctgtctctatgtggttgtctatttgagggacatcacataagtggagtcatatatttgtcctttcatgtctcccttatttcatttagcataacgttttcaagggtttcctgtgttgtgaatatatcagaatttcattctctttttaaggtagaatcatatcattttaaaacatttcagttggaccatctaagttcagtccttcattttcaacaattaaaaaacagccctcaaccgggtgcatctcacgttagctagagacagaactggagctagaagtcagatctcttaccaaagttgcctttcttcttctgtgggtaagtggggcacccttgggacgctgtgctgggcgtacatgggtgcttgatgaagttacttggtggactgatgtgattgatgtccaacatgtatgcagggacagaggctatggtccctacagagcaggcatggagagaaggagaaatacatacgggcaggagccaggagagggagggtgtagtgagcagagaccgcgccactgcactccagcctgagtgacagagtgagaatccatctaaaaaattgcttactaaagaagtggtctcctgaggtcttaagacgttcctggcaatgtcttgagtgggtgggagagagcctccagtcattgagctgtggaatttcagaggtgagaaccacacctaacccccaattactttcccctgtttgcctcagtgacacagctgcaggaaccctggtgggtgttgtattaagtaaatttgacctttattctttgcagatctgtgaaatgttgtcttctgaggggccacgtgtatctgtagtgctgaggactccttggggcctctgaagtcacagagagaacctgcagggtgggggaccagtgtgtgacagccctgctttgcattttctttgagaagtgctgtcattttgcatttctctccaccaggggaatcttcaatcttgagaggtgtgatcataacttgccttgtttcttgtcgctacagagaacggaaggctcccttgatggaacttagacagcaaggccagatgcacatccctggaaggacatccatgttccgagaagaacagatgatccctgtatttcaagacctctgtgcacttatttatgaacctgccctgctcccacagaacacagcaattcctcaggctaagctgccggttcttaaatccatcctgctaagttaatgttgggtagaaagagatacagaggggctgttgaatttcccacataccctccttccaccaagttggaacatccttggaaattgggaagagcacaagaggagatccagggcaaggccattgggatattctgaaacttgaatattttgttttgtgcagagataaagaccttttccatgcaccctcatacacagaaaccaattttcttttttatactcaatcatttctagcgcatggcctggttagaggctggttttttctcttttcctttggtccttcaaaggcttgtagttttgggtagtccttgttctttggaaatacacagtgctgaccagacagcctccccctgtcccctctatgacctcgccctccacaaatgggaaaaccagactacttgggagcaccgcctgtgaaataccaacctgaagacacggttcattcaggcaacgcacaaaacagaaaatgaaggtggaacaagcacatatgttcttcaactgtttttgtctacactctttctcttttcctctacatgctgaaggctgaaagacaggaaagatggtgccatcagcaaatattattcttaattgaaaacttgaaatgtgtatgtttcttactaatttttaaaaatgtattccttgccagggcaggcaaggtcgtcacgcctgtaatcccagcacttcaggaggctgaggtgggcggatc

SEQ ID NO: 3241 - DNA, 3451 bp, Homo sapiens
cccgggttcaagagattctcctgtctcagcctcccgagtagctgggactacaggtacgtgccaccacacctggctaatttttgtatttttagtagagacaagagttacaccatattggccaggatcttttgctttctatagcttcaaaatgttcttaatgttaagacattcttaatactctgaaccatatgaatttgccattttggtaagtcacagacgccagatggtggcaatttcacatggcacaacccgaaagattaacaaactatccagcagatgaaaggattttttttagtttcattgggtttactgaagaaattgtttgaattctcattgcatctccagttcaacagataatgagtgagtgatgccacactctcaagagttaaaaacaaaacaacaaaaaaattaaaacaaaagcacacaactttctctctctgtcccaaaatacatacttgcatacccccgctccagataaaatccaaagggtaaaactgtcttcatgcctgcaaattcctaaggagggcacctaaagtacttgacagcgagtgtgctgaggaaatcggcagctgttgaagtcacctcctgtgctcttgccaaatgtttgaaagggaatacactgggttaccgggtgtatgttgggaggggagcattatcagtgctcgggtgaggcaagttcggagtacccagatggagacatccgtgtctgtgtcgctctggatgcctccaagccagcgtgtgtttactttctgtgtgtgtcaccatgtctttgtgcttctgggtgcttctgtgtttgtttctggccgcgtttctgtgttggacaggggtgactttgtgccggatggcttctgtgtgagagcgcgcgcgagtgtgcatgtcggtgagctgggagggtgtgtctcagtgtctatggctgtggttcggtataagtctgagcatgtctgccagggtgtatttgtgcctgtatgtgcgtgcctcggtgggcactctcgtttccttccgaatgtggggcagtgccggtgtgctgccctctgccttgagacctcaagccgcgcaggcgcccagggcaggcaggtagcggccacagaagagccaaaagctcccgggttggctggtaaggacaccacctccagctttagccctctggggccagccagggtagccgggaagcagtggtggcccgccctccagggagcagttgggccccgcccgggccagccccaggagaaggagggcgaggggaggggagggaaaggggaggagtgcctcgccccttcgcggctgccggcgtgccattggccgaaagttcccgtacgtcacggcgagggcagttcccctaaagtcctgtgcacataacgggcagaacgcactgcgaagcggcttcttcagagcacgggctggaactggcaggcaccgcgagcccctagcacccgacaagctgagtgtgcaggacgagtccccaccacacccacaccacagccgctgaatgaggcttccaggcgtccgctcgcggcccgcagagccccgccgtgggtccgcccgctgaggcgcccccagccagtgcgcttacctgccagactgcgcgccatggggcaacccgggaacggcagcgccttcttgctggcacccaatagaagccatgcgccggaccacgacgtcacgcagcaaagggacgaggtgtgggtggtgggcatgggcatcgtcatgtctctcatcgtcctggccatcgtgtttggcaatgtgctggtcatcacagccattgccaagttcgagcgtctgcagacggtcaccaactacttcatcacttcactggcctgtgctgatctggtcatgggcctggcagtggtgccctttggggccgcccatattcttatgaaaatgtggacttttggcaacttctggtgcgagttttggacttccattgatgtgctgtgcgtcacggccagcattgagaccctgtgcgtgatcgcagtggatcgctactttgccattacttcacctttcaagtaccagagcctgctgaccaagaataaggcccgggtgatcattctgatggtgtggattgtgtcaggccttacctccttcttgcccattcagatgcactggtaccgggccacccaccaggaagccatcaactgctatgccaatgagacctgctgtgacttcttcacgaaccaagcctatgccattgcctcttccatcgtgtccttctacgttcccctggtgatcatggtcttcgtctactccagggtctttcaggaggccaaaaggcagctccagaagattgacaaatctgagggccgcttccatgtccagaaccttagccaggtggagcaggatgggcggacggggcatggactccgcagatcttccaagttctgcttgaaggagcacaaagccctcaagacgttaggcatcatcatgggcactttcaccctctgctggctgcccttcttcatcgttaacattgtgcatgtgatccaggataacctcatccgtaaggaagtttacatcctcctaaattggataggctatgtcaattctggtttcaatccccttatctactgccggagcccagatttcaggattgccttccaggagcttctgtgcctgcgcaggtcttctttgaaggcctatgggaatggctactccagcaacggcaacacaggggagcagagtggatatcacgtggaacaggagaaagaaaataaactgctgtgtgaagacctcccaggcacggaagactttgtgggccatcaaggtactgtgcctagcgataacattgattcacaagggaggaattgtagtacaaatgactcactgctgtaaagcagtttttctacttttaaagacccccccccccccaacagaacactaaacagactatttaacttgagggtaataaacttagaataaaattgtaaaaattgtatagagatatgcagaaggaagggcatccttctgccttttttatttttttaagctgtaaaaagagagaaaacttatttgagtgattatttgttatttgtacagttcagttcctctttgcatggaatttgtaagtttatgtctaaagagctttagtcctagaggacctgagtctgctatattttcatgacttttccatgtatctacctcactattcaagtattaggggtaatatattgctgctggtaatttgtatctgaaggagattttccttcctacacccttggacttgaggattttgagtatctcggacctttcagctgtgaacatggactcttcccccactcctcttatttgctcacacggggtattttaggcagggatttgaggagcagcttcagttgttttcccgagcaaaggtctaaagtttacagtaaataaaatgtttgaccatgccttcattgcacctgtttgtccaaaaccccttgactggagtgctgttgcctcccccactggaaaccgc

SEQ ID NO: 3242 - DNA, 914 bp, Homo sapiens
ttttacagaactcccacggacacaccatgataaggacgctgctgctgtccactttggtggctggagccctcagttgtggggaccccacttacccaccttatgtgactagggtggttggcggtgaagaagcgaggcccaacagctggccctggcaggtctccctgcagtacagctccaatggcaagtggtaccacacctgcggagggtccctgatagccaacagctgggtcctgacggctgcccactgcatcagctcctccaggacctaccgcgtggggctgggccggcacaacctctacgttgcggagtccggctcgctggcagtcagtgtctctaagattgtggtgcacaaggactggaactccaaccaaatctccaaagggaacgacattgccctgctcaaactggctaaccccgtctccctcaccgacaagatccagctggcctgcctccctcctgccggcaccattctacccaacaactacccctgctacgtcacgggctggggaaggctgcagaccaacggggctgttcctgatgtcctgcagcagggccggttgctggttgtggactatgccacctgctccagctctgcctggtggggcagcagcgtgaaaaccagtatgatctgtgctgggggtgatggcgtgatctccagctgcaacggagactctggcgggccactgaactgtcaggcgtctgacggccggtggcaggtgcacggcatcgtcagcttcgggtctcgcctcggctgcaactactaccacaagccctccgtcttcacgcgggtctccaattacatcgactggatcaattcggtgattgcaaataactaaccaaaagaagtccctgggactgtttcagacttggaaaggtcacagaaggaaaataatataataaagtgacaactatgc

SEQ ID NO: 3243 - DNA, 562 bp, Homo sapiens
tggtcatctcagtttcttttctcaccttgactgcaagatgaaactccttgtgctagctgtgctgctcacagtggccgccgccgacagcggcatcagccctcgggccgtgtggcagttccgcaaaatgatcaagtgcgtgatcccggggagtgaccccttcttggaatacaacaactacggctgctactgtggcttggggggctcaggcacccccgtggatgaactggacaagtgctgccagacacatgacaactgctatgaccaggccaagaagctggacagctgtaaatttctgctggacaacccgtacacccacacctattcatactcgtgctctggctcggcaatcacctgtagcagcaaaaacaaagagtgtgaggccttcatttgcaactgcgaccgcaacgctgccatctgcttttcaaaagctccatataacaaggcacacaagaacctggacaccaagaagtattgtcagagttgaatatcacctctcaaaagcatcacctctatctgcctcatctcacactgtactctccaataaagcaccttgttgaaagaa

SEQ ID NO: 3244 - DNA, 2943 bp, Homo sapiens; identical to SEQ ID NO: 2060

SEQ ID NO: 3245 - DNA, 3045 bp, Homo sapiens
cagaccatggaactcagcgtcctcctcttccttgcactcctcacaggactcttgctactcctggttcagcgccaccctaacacccatgaccgcctcccaccagggccccgccctctgccccttttgggaaaccttctgcagatggatagaagaggcctactcaaatcctttctgaggttccgagagaaatatggggacgtcttcacggtacacctgggaccgaggcccgtggtcatgctgtgtggagtagaggccatacgggaggcccttgtggacaaggctgaggccttctctggccggggaaaaatcgccatggtcgacccattcttccggggatatggtgtgatctttgccaatggaaaccgctggaaggtgcttcggcgattctctgtgaccactatgagggacttcgggatgggaaagcggagtgtggaggagcggattcaggaggaggctcagtgtctgatagaggagcttcggaaatccaagggggccctcatggaccccaccttcctcttccagtccattaccgccaacatcatctgctccatcgtctttggaaaacgattccactaccaagatcaagagttcctgaagatgctgaacttgttctaccagactttttcactcatcagctctgtattcggccagctgtttgagctcttctctggcttcttgaaatactttcctggggcacacaggcaagtttacaaaaacctgcaggaaatcaatgcttacattggccacagtgtggagaagcaccgtgaaaccctggaccccagcgcccccaaggacctcatcgacacctacctgctccacatggaaaaagagaaatccaacgcacacagtgaattcagccaccagaacctcaacctcaacacgctctcgctcttctttgctggcactgagaccaccagcaccactctccgctacggcttcctgctcatgctcaaataccctcatgttgcagagagagtctacagggagattgaacaggtgattggcccacatcgccctccagagcttcatgaccgagccaaaatgccatacacagaggcagtcatctatgagattcagagattttccgaccttctccccatgggtgtgccccacattgtcacccaacacaccagcttccgagggtacatcatccccaaggacacagaagtatttctcatcctgagcactgctctccatgacccacactactttgaaaaaccagacgccttcaatcctgaccactttctggatgccaatggggcactgaaaaagactgaagcttttatccccttctccttagggaagcggatttgtcttggtgaaggcatcgcccgtgcggaattgttcctcttcttcaccaccatcctccagaacttctccatggccagccccgtggccccagaagacatcgatctgacaccccaggagtgtggtgtgggcaaaatacccccaacataccagatccgcttcctgccccgctgaaggggctgagggaagggggtcaaaggattccagggtcattcagtgtccccgcctctgtagacaatggctctgactccccgcaacttcctgcctctgagagacctgctacaagccagcttccttcccctccatggcaccagttgtctgaggtcacattgcaagtgagtgcaggagtgagattatcgaaaattataatatacaaaatcatatatatatatatgttcttgttttttgagacagagtctcacactgttgcccaggctggagtgcagtggcgtgatcttggctcactgcaacctccacccccggggatcaagcaactctcctgcctcagcctccctagaggctgggattacaggcatgcactaccacgcttggctaatttttgtatttttagtagagatggggtttcactgtgtaggccaggctggtctcgaactcctgaactcaagtgattcacccaccttagcctcccaaagtgctgggattacaggcgtgagtcaccgtgcccagccatgtatatatataattttaaaaattaagctgaaattcacataacataaaattagccgttttaaagtgtaaaatttagtggcgtgtggttcattcacaaagctgtacaaccaccaccatctagttccaaacattttctttttttctgagatggagtctcactctgtcacccaggttcgagttcagtggtgccatctctgtccactgcaacctccacatcctgggttcaagtgattctcctgcctcagcctctggaggagctggtatcacaggcgtcccccaccacgcctggctaaattttgtatttttaggtggtcttgaactcctgatgtcaggtgattctcctagctccaaatgttttcattatctctcccccaacaaaacccatacctatcaagctgtcactccccataccccattctctttttcatctcggcccctgtcaatctggtttttgtcactatggacttaccaattctgaatatttcccataaacagaatcatacaatatttgatttttttttttttttgaaactaagccttgctctgtctcccaggctggagtgctatggtgcaatttttgttcactgcaacctctgccttccaagatcaagagattctccagtctcagctcccaagtagctgggattacaggcatgtactaccatgcctggctaattttcttgtagttttagtagggacatgttggccaggctggtggtgagctcctggcctcaggtgatccacccacctcagtgttcctaagtgctgatattacaggcataatatgtgatcttttgtgtctggttgctttcatgttgaatgctatttttgaggttcgtgcctgttgtagaccacagtcacacactgctgtagtcttcccgagtcctcattcccagctgcctcttcctactgcttccgtctatcaaaaagcccccttggcccaggttccctgagctgtgggattctgcactggtgctttggattccctgatatgttccttcaaatctgctgagaattaaataaacatctctaaagcctgacctcccc

SEQ ID NO: 3246 - DNA, 4567 bp, Homo sapiens
cctcgcccgccccgcgcgtgactgacagggccactcagggcgcgcgtgcgaggtgctcgcttgggtaatctacctgcgtgggcccgccggcggtaccctgcacagcctgctagaaactgagaccccgggtggtgacagctctggcatcgcccctgggtcctcgggaagaggggacagaaggtcccgagtctcccaggccacacgaagcaagtcactgctcttcctggcctcagtttactcctcctgataaaggaggccataatagtgcctcacctggctgttggctctttctctttagggcaaggcaggttggaggggaaaataggacctgtgcttaccgccggagcagggcgagagtgattctgggccagttctgaacctctctgagattcggagatctcttgtcagtggggcttctggacaactgagtgggctgattgatgcgcggcccagcacgcggcccagtgctcgaggcagggagcgtgtttatcaagagggataaacttgatacgaactctgtacgaaggaaggtgtaggtggatggaggggtgtgtgctgccactgagcacaagaacccacggggtggcctgccaaagttcaaaacgagggagacaggttgatctggacccaggaactacagtgctgaatcctaaaccggggaaagatgagacctagaagagggaggtggtaacctaattggagggtgaggagggaaagagcctgccacagatggggcatctataggggtgctgttgataacagagcagctgacttaagcccgaagtgggtacttctccctgggcagatgggaggtctgggacaggctcctctggcagaagggctcctggccaccctgtcctaaggtgggtcagtcacttcctccttcaccagttccacagcatcttactatgagcttggcattcgaggcttctcttggcagggccctgcactcctagcctctccttgcacattgcacccccattccagagaggtttagttaaaggcgggggttaccaagtcagtcagatcttgggcaagtcaccactcctccagagcctcagtttccttatctggaaagtggaggtcatggcaacccgccaacctggttggatgggagcctgagctgttgtgttgcaccttgcctggggcccacgactttgtagctcctgtcctgcactgggcttatgttttcattcattccagaaaccttttcagagagtccctttggggagtgtgggggacaggagggaaagaaacctggtccttgtagccgttcgtctgctccctgccctgggcagaggacatggggactcaggccagcctgagatcactgggaccagaggaggggctggaggatactacacgcaggggtgggctgggctgggctgggctgggccaggaatgcagcggggcagggctatttaagtcaagggccggctggcaaccccagcaagctgtcctgtgagccgccagcatggatgacatctacaaggctgcggtgagggacagggctgggtagggctggggtgggcaggcccactgggggctcactcagctgagagtgcggggttagtagccccagggaagtggtggggaccaaggagaaggcctacgtgccttcaacccaggccctcacagggacagtgattctggtgtttgaggatgcagaagggggtagggggttccgggtctgaagggtggtggaggaggttgcagctttctgatcgtgtctcactctctgtttccaagtgtctgtggtctgtggcactgtcgctcagccacatgtctctgcatttgtctctggacgtttttgccttcctcttttcatctcttcctcctgagctgtctgagtccccattactgtctccctgtccccaacccccactttctgcccctcacattctgcttctcacatgctcaaaatctgccacccactccagcccttggcgggccgaagatgcttggagggtggagggtgtgagaggaggggtctgtagagcctgagtcctgggctggagatggggctttgaagtttgaggcagggaagttctggacatgagggagaaccaaggaagaaggaacagagaactggggccccagctcccatcatgcctggcaggctcagggctcagtggcttagctaggggtgagagcgagggaatgagggctggagagtggtcaccccaagcccctgcaacctcctgggtcactgagggtcttcagatgctattctatcctgggtggtggtacctccccaacccagagcaaggacatcctggcatggccagctgtccccaggggaacccctccctcagcctccctcactcctgggcagggaagtgctatagccagctctgggggcacgcctgcttatcctgtgggagtccatggagccggggtggggacagccctccacccagtgcccatacaaggcctggcggagttggggactaattttggcttctgaggcggcactagcagccagggggccagataacgctgccccctgcatgccaaagtccccagaacaatcaccaggtttcactttgttcctcgttaaaaatagcccagtggccaccctggtcaggttaccgtgggtggcttgcctgcctccacactggttttattatcccaacttagggacagctgtccttccggcccacccagcttgagtttcatcaggggccgaaagggcattgagtggtcactgactattgttactgagggtcaccttggtcctgaagggggtgcccacctgtcaccctggccctgagcccagtcgcagtgaggccagctgggtcacgtcagggctttgggggcagggagggaggactgagacctccactctgtggcctggaaatagccagcctcctccagctccagccttctcacctgtggaatgggttggttcctacgcagcagctatacctgagtctgagaccttgagattccctttccttctaggtagagcagctgacagaagagcagaaaaatggtgagaatccctatcacacatgtgggagaccagcgggtccaggctggcatggggaccccttatcagaagaggaccccaggccagagaccagaggcttggtccctcttgctctgccctcagagaggtctccgagggaggtgggcaggttggcaggtggccccagggttctggccctccgtggtcctggctgctgagccctgactaccgtgccccccaacccctgaacacagagttcaaggcagccttcgacatcttcgtgctgggcgctgaggatggctgcatcagcaccaaggagctgggcaaggtgatgaggatgctgggccagaaccccacccctgaggagctgcaggagatgatcgatgaggtggacgaggacggtgagcccccctcctccccaggctccagaagaaccccagctggctgggggctggaatgctggctctgtttagctgggagcaatttagcctatccgagccttggttgcctcatctataaaatgggcataagggctacacaagcctggcgtttggtgtgaggatgcggtgagaacatgggggttcgtgtcgaaggtgctgcctgcagtacctaccctggcctctgtaacggccatgctgcccacccccaggcagcggcacggtggactttgatgagttcctggtcatgatggttcggtgcatgaaggacgacagcaaagggaaatctgaggaggagctgtctgacctcttccgcatgtttgacaagtgagcacgtgacccttgacctctgaccctgacccacactcaagccgagctgtacaggagggcagtctcagattccaggcctagggaccctgtggcctctgcctgataggggagagggatgccccatctcccagtgtccctgctctgcctcctggggcatgggtggggctgcctcatgccctccccacagccctaccctgagccccctccccacagaaatgctgatggctacatcgacctggatgagctgaagataatgctgcaggctacaggcgagaccatcacggaggacgacatcgaggagctcatgaaggacggagacaagaacaacgacggccgcatcgactatgatggtaagcgggtgggtgggctgatctcctgcctccatgccctgcccagcccctaccctcaacccacacctgcccctctttccacagagttcctggagttcatgaagggtgtggagtagatgctgaccttcacccagagctgcctatgcccagcctccaactccagctgagtcctggggttggggagggggtcggggtcccaggacctgagcctggccatgtcctcaaccccaaatcccccgactccctccccagatctgtcctgggggatgcaaataaagcctgctctcccaaggtctgctatctggctctggtgtccctgggccgtggactcatccccaggacccactcttacccaatggccgcttccttccctgtcctaggcaggctggctgcagagcctggcgcctgaccaccgctccacactgccttctgcaggggggtgagatgagatcggagactgccgtgtggcctgccctgct

SEQ ID NO: 3247 - DNA, 459 bp, Homo sapiens
  misc_feature (1)..(459): n=a,t,g or c
acaattgttttattcaaaggaaattaaatacaaatgtatatttttcattaaaaatggggatttaaaaatagttttataattagtgttatgttgctttatcttatctttgcataaattatgtattattaaaggtttctgatatccatatacattctagtcttttttaggcagctatgagaagatttcatattcaaaagccaatgccacttttctaaagaaacgatctttgtgccaaattagtacgacaattgctccaaatctctggtcttgacttccggttgtgtgaagagcagtgttttgtttttttcagagaagggaaagagccttcattctttaggtttgtttttgcctcaaagacatttctatatgggtatctaaagttttagtttataagtctcataatgatttgacccatgcagtccaacttttagatagtatttccataccccccaaaagcnt

SEQ ID NO: 3248 - DNA, 445 bp, Homo sapiens; identical to SEQ ID NO: 178

SEQ ID NO: 3249 - DNA, 511 bp, Homo sapiens
  misc_feature (1)..(511): n=a,t,g or c
aagccagaacttgtttattgaaaaagcactaaaacaaaatattttggtaagatcgagcaagaagacacaaatagagaatggaaaaatgaaaattttataaacgcagttgaaatttgaaaatgtgaggatattatgaacaattcatttgaaaactgacaaaatacacaaattactacgagtattttactcaaactaattgaagatagacatgtaatcccacagctcctaaatagtttcagtaattaaaaatttcccccaaagaaaagccttttatagtaagttccactaacctgttccatatggtaccaattcttaatctaacagttaacagttcattcaaaataatgggcaacaatgtatttggattttgtacacatatatttgtgtgtgtgtgtgtgtgtgtgtgtgtgtatagtcgtcatacctaggggtgcntatatataagtggaatggacagcnatgatacntgggataggaaagagaaattaggattatttttggtaccataagg

SEQ ID NO: 3250 - DNA, 417 bp, Homo sapiens
  misc_feature (1)..(417): n=a,t,g or c
caccantgaacatttattgagtgtccacatgtgcacagctttgaacttggcgatcacagaacgcactgggggagggaagcaagggatcaagagtgtgtgtgtgtgtgtgtgtgtgtgtgtgtgtgtgtgtgtgtgtgtgtgtgtggtccccctgggtttataagaaaggtagtccctgctggagccgccagtcgcgtctctgcagagaggagtcatagcaggggtgggagttaaagccaggcaccacggtggcagtngggaagtgtccctcctgttcctggctccagcagcacagatggcaccagggggacaggaatcagatgctcaggtntccaagcagggataaggacaggcaaaataaataaccccccaacccccatncgtcactctgctgcaacacgacacaaaggtttaaag

SEQ ID NO: 3251 - DNA, 396 bp, Homo sapiens
  misc_feature (1)..(396): n=a,t,g or c
ttttttttttttgaagtaaatatctgtttaatttacaaacatcagcagtgtaaccgatattaanctggagaaagacaaagcacnctgaattatacatgtacatctaatttnctttgtaaaaaaagaagttttcaggaagaaacatctgcatctttacagggcaccctgggattttaatgagggaagagcacagttcactataaaccattatcaattctacattgtaatttagcagcaaacatnttaacangggngcattaagataataaaggggttttatngtttgagggaaagaaaagtcncagttcttgatatgacagtctttttatccccacctcacccccagaaaagggcaaaaaaggtcaaggacatattaatttgcaaaaggtctacttt

SEQ ID NO: 3252 - DNA, 354 bp, Homo sapiens
agtatccttttatttttttttaaagcacaaatgcccacacaactttgacttacaaggtagttctatatagaataaattaaaatgttagtaaaatctgtattaaaaactatgtacaattaaatgtggtttacagggtacataattatgcttctcacatcaattatagttgaggacaattatagttgaggttatctaaaagaaagtgtaatacggacatgaccattcataagtaaaaggctggaagtctccctggagtttatgcagatgatttttacttgttattgcacagtgtgaattggtaggggaaaaaataatacactaacccctggggcccatacaggcaaattaaggatt

SEQ ID NO: 3253 - DNA, 367 bp, Homo sapiens; identical to SEQ ID NO: 1019

SEQ ID NO: 3254 - DNA, 517 bp, Homo sapiens
  misc_feature (1)..(517): n=a,t,g or c
tcattgttaaactcagtttaatagaataaatattcaaataagaattgactataccaatattccagtagagaaggaataagctgatagacgtgtctttgagttctgtcaggcaagacttaaccaaatcttgacacacggttaaaattggttgttaatgaaaggtaactagataaaataggtatatatttgcttaagaacattttaaaaatatttctttttttagatttggaattcacaataggtttcttccgttcctcctttgtaaattatgaaatatttattgtttagactgagtaatatgacatgaaacaacaaacctgcacatttctaatttataacaaatctgnttccttaatgggtggaaggaaatctgaggacagttcnaaggagtcctggtctgcttttccagtgcggatcttcnaggtcctacnggaagaccataccctctccagattgggcctttccccttccttctcctctccccggtcaacgtcaatcacatgcaccactccagggn

SEQ ID NO: 3255 - DNA, 467 bp, Homo sapiens; identical to SEQ ID NO: 2539
  misc_feature (1)..(467): n=a,t,g or c

SEQ ID NO: 3256 - DNA, 413 bp, Homo sapiens
tgaaaggaaaaaattcaaagtttattcaacattaagaataacagacagataaaggtttggacttaacagcataaataccaccaatatcatggtgtacaattaaactaacctcatgtcaacttgtacctgtttaacagatgcgatctttgtggtgttgccaaaaggataatggattattgttatgtttggtaaggtgctcaaaattaaagactttatgtcgacttattcacacacatacacacacacacacatgcacgcacacacacacacacacactcttacacttagcctcctgcaaaatgtattgactttagttgctatatccgattcggataaaggctttgctcattttttaaatgacattattaattgcagaaaaaacgtggaggagaccttggccttggcaggtgggg

SEQ ID NO: 3257 - DNA, 419 bp, Homo sapiens
  misc_feature (1)..(419): n=a,t,g or c
nttattttaaataaatattttaattctattgttgacatttacaagtagaaagcatacagtatgttacaaatatcaaaatgagaaaaatatgaatgttacataagtaacaaatataaaaaaagtattttcttaccttccctgaaagtaagaaaactattcagcataggaaaatatcagtatcaaaaacacagcttaggtgtaaaaaaagtttttacacagtatttaaaaaaaatgatctacaaaatgacaaagtaagtgttgaaatctgatttcatataaattataaaaactgggtacttagagtaaatgttatctggttggaaaataagtccaatcataagctttccttaggtcaattctttaaaatattaaaagcataccgaaaaattttccaataaataaccttnaagaggggttcc

SEQ ID NO: 3258 - DNA, 189 bp, Homo sapiens
  misc_feature (1)..(189): n=a,t,g or c
nagcaagcaaaaaactacctttatatatgatgttattcaaatacatggataagataacacattttatgatgtaaaaagtaatatttaaaaattaaaaggcaagtctttctggtattcagaagtctgaagcaaccactgtccagctctttaaaaagagcacattccattctggtggcacacaaatgtaca

SEQ ID NO: 3259 - DNA, 377 bp, Homo sapiens
  misc_feature (1)..(377): n=a,t,g or c
ttttcccagtttcatggaacttttattgagtttatttgtgggatgcatgacaggaggtctttccatcattagtaagaatgaaaggtcattttcacagtcactttggcacacgctaacgtctcataaaaaaaaccagaaaagcaaagacaatnggaacctatagaatacgtcattaaatacatacaaaacactaataaaatatccctgataaaccaaagtgcatatgcccaggacagtattgcaccttccccagtcgcgcgtgtcntcagcatggcctcngtcaaagttggaagttaacagtcgtgagattagtacgcaggtgcacaccagttatttacagaacggcggtcagagcccgggagtaggggccggccgcc

SEQ ID NO: 3260 - DNA, 163 bp, Homo sapiens
  misc_feature (1)..(163): n=a,t,g or c
tttatggggcgggaactttttatttgaagcaagttaatcatagcattgccccccagtaccctggtatcctgctacaaggagcatcacaccatttgggcacatggtgtgcntcatccactagcctggcatctcagcagacagcagagggcagcagaagctcagc

SEQ ID NO: 3261 - DNA, 231 bp, Homo sapiens; identical to SEQ ID NO: 200

SEQ ID NO: 3262 - DNA, 222 bp, Homo sapiens; identical to SEQ ID NO: 1685

SEQ ID NO: 3263 - DNA, 527 bp, Homo sapiens
  misc_feature (1)..(527): n=a,t,g or c
cctctgccacaaaagacctttaatggcctcctatttattgttcttttgttcatttgttagagttgaatgaactataataacttgtctgacataataagaatgccacaggtataacagataaacctggcaggtggtccaggaatgagagtgtcacaaaataatcactcaacacaagggccacagacctggagattcttcccagccatccctcactcctgccccaggacacaacccatgcaggcccccattccataggaagaggcaggtcccacagtgtctgtggctagaccttaacactgagcagagatgcccgggaagatggcacttcctatgctcgttcccaagtgctctgctcatctgccatgcaggtcaggaccataccccgagtttgtgaggcacccacctctcatactcaccacctcatatgaccacctatcatacccanctctcctatgacccttgcaattgtcccagtgaagtgggaagagctggactagcccattttgcacacagggaactaaggacac

SEQ ID NO: 3264 - DNA, 298 bp, Homo sapiens; identical to SEQ ID NO: 745

SEQ ID NO: 3265 - DNA, 447 bp, Homo sapiens
  misc_feature (1)..(447): n=a,t,g or c
aacagggcggctttttgttttatttctgtttttttccctttttcttaaaaaaattaaataaagttctcattatttccccaatatacatcaaatgagttttcatgcaaagcagcagtcacagaggcagaactgtccccagctcgtgcctctcggcttgaagaaccaccttctcccggccccgggttctctggtgttctcactgaggatggacgacgcccactgtctctcccagctggaactggctatgacgaaacttggctggcgtagggagaggagtcctcccctctccccaggatgggtctcaggggacagcaagctctggggctgatcnccatcattgtccttccatctgagatcccagtgtgacanttggaaagtcctcttcccaggaatgcgaggtccnctctcagtctcaatggaatgggataatgagtgtncacctataag

SEQ ID NO: 3266 - DNA, 510 bp, Homo sapiens
  misc_feature (1)..(510): n=a,t,g or c
ttttttatacaaacaagtttcttttattgtttccacacattcataataactatagaacagaaagattgttttaatttgctgtcctacttcggtgacctgatgaatacactggtaacagtccccagtttgagtaagatcagttgaagcccttactgtataagtccaaaatttaagaaaaatgaatctcacgatgagcttcctcaggcttcggccgtgcgtggaccagtcagcttccgggtgtgactggagcagggcttgtcgtcttcttcagggtcactctgaaagggttgtctgggcttggtcttgcctcccaggtttcacgcgctgcaggttttacatggctgtggtggatccaggctgggattccttctacttcacagcggtgggagggctcagaacgacagctggggtctttccacagtggacacaaagaggtacgttccagttcttgatcaaatngatcactggggagaaaaggtgaactggggagaataantaacaggccattta

SEQ ID NO: 3267 - DNA, 215 bp, Homo sapiens
  misc_feature (1)..(215): n=a,t,g or c
ttttcagaaattgaaccgtttattagcctaggtctgggtttcaggcattgcggagnacgtctggggagctctatgaggggaaacaagcccctgactggctccttgccccccaaagacccgctcccccaggctttgcattcacaagaaattactctgaggcatgaggtttccttccccaaggtgagctgcaccccagctctccagtgggaggatgg

SEQ ID NO: 3268 - DNA, 457 bp, Homo sapiens
  misc_feature (1)..(457): n=a,t,g or c
ttttttgtgtgaaaagccttcattgtgcaagcgtgcccancaaacaaacaccaggtctgcgctggccgaagacgaagcgtcctccctggagtcgggaacaagtcacctctgaccacacctcctctgacgccatcacctcctcctggccccacccaagggctcgacacaagccccaaggtcggggggagaggggcggggcggaaccgagggcggaggcaaggtgggattccaggaaggccttccgaagatgggacggtgggtcctgtccctccaggtagcttgtgggtgtggacagcaggacttgctggctcagtgtgggcacaaggacactgtgccactggttgagtgagtggtgagggattggaggtggctcccagaggactccatcttgcatggccctggccttgtggcttccagnaggcttgccctggctgtgggtaagccangagcanatgcg

SEQ ID NO: 3269 - DNA, 440 bp, Homo sapiens
tttttttttttactttcatgcaaaatctttatttggaaacatgtatgttactgagcaggccagccgccatcctgaaatagcaaggatatttacactgtgcagagaaatacaagagcttcttgaagacattcatctgtgctttgccggcattttatctgctactttgtcctgcttctctcttccctgtgctcattattcttcatgcaccctcacctctcatcaccttaaggcatcctgtaccagcctgatctgggggcgatgactgcagccggcaatcggcaattaccaatggtgtctttctgggaccctttctacctgtcttaggtattaatggtgcccaaagaaaaaatgaagagatgaaagtttctgtggttagctgggcatgggtggtgtgcacctgtagtcccagctactaaggaggttgaggtggggatagtgct

SEQ ID NO: 3270 - DNA, 295 bp, Homo sapiens; identical to SEQ ID NO: 1995
  misc_feature (1)..(295): n=a,t,g or c

SEQ ID NO: 3271 - DNA, 358 bp, Homo sapiens
  misc_feature (1)..(358): n=a,t,g or c
tgttaagtacttaagatttattgaatgagaactgcattgtacaatatggtgccactagacacgtctatttaatttaaattaaaatataaaactctaaaactagccatgattcaaaggttcaatagctatatgtgactagtggctaccatataaaacatttccatcacaaagttccatttatcagatcttatataggaaccttgantaaaatttaatagacaagtgattttgtatttaacatttcacctttattgaatgccctatagggccatttgaatacgggtcatgtncaaggcacaggggaaaaaaaaactgcagcnggtaagggttttncaggggggttttccaggtcccctcc

SEQ ID NO: 3272 - DNA, 364 bp, Homo sapiens
  misc_feature (1)..(364): n=a,t,g or c
aataaagaaaaaantttccatccaacttgaagaaaaatcagaaagtatttttctccatggaccattattctatttgaacctaacctgaattccctcatagtcaaaacctgccatgatgatgtgaattcatttccgcatagtcggaataatttttgctccaaattcttaaaggagacaatgaattagtagcttgtaaattttgcagatctgggccttcaataacttagtaggaagggcaataaaataggaggggaaaaatggggactgtgggattacaactgtttcaaatttcatcttaatttcttctatttttctcaaccatatttcttctatttttacaatcattattaaaatatttccctaa

SEQ ID NO: 3273 - DNA, 384 bp, Homo sapiens
  misc_feature (1)..(384): n=a,t,g or c
ttttttttttttttagctcaagaacaagtttttattatgcattgggtttcgcagtgatacaagacacctgctcacaacttacagtattaattttttagaaaaacaaaacaggtatatggcatgagtgaaacagttccccattaaaagcacttaaaacctatgacatggctagtaagatgtaaaatattaagtccccttgggtcttgcaaacttgtatttcctaacaatttggaagccatgatgatagtctgaagctaaaggaactccaatttcttggnatgatactaaataaagattcttatcttttggggagaaagagccaaaacagaagggtntgaaagcagtgaatttcccctccntatggccaataaagcaagaggggca

SEQ ID NO: 3274 - DNA, 239 bp, Homo sapiens
  misc_feature (1)..(239): n=a,t,g or c
tttttttttatgtatttccaaaatcacaaaatgcacaacattcatngtttttaatattgcaacatggaatattatatacagattaaaaccacgacagcaaaaacactcacacggtaccagtttcatatcaaaacaaaacacacaagtgctttttcaatattaaaacgactgtgataaaaacatattaatattttgaaccatgtttacaatagngcaaaattcatattttactaaataac

SEQ ID NO: 3275 - DNA, 469 bp, Homo sapiens
  misc_feature (1)..(469): n=a,t,g or c
ttttttttttttttttttttttttttttttactatttaaataattttatttgtttcancctttggnagatgagaaaaatacattacaaaatacattatacagaagacagctcacagtacacattactaaaaacacaatctacattccagccagggctggtgggtaagttcagaagaaagccacagaggccttggaaaaccagatttcagactctatgggantggaattttccccttatgtcccgtctttatctcaacctcaggcatgttttnttaggcacccctaattagggnggggtgtggggtaggagttaggaggcaggcattgaggtggggactgggngggacttctccattccaccttaaaggcaggcaaacctttaaaagtcccccccaaaaggnaagggggtagggggaggggggnaagaatgggcccaatgtggaantttgccgtgttctncaaaggcttt

SEQ ID NO: 3276 - DNA, 312 bp, Homo sapiens
tttttttttacttgaaaaaattcacatttatttactgtcaaaccgtgttaaactttacactggatattagtgatgggctcattattaacaggtttacacaaagggatgaaaaaaaagcagaattttgctgaaacaatttacatttcattagaactttatcataaaataaattaattactaaatataggcagaaggaatatggaagagtaatatttatgttttattttatttttttaaaaaagaataggcaccttttgttcactagaaagtttgtgagaagtgcccagtgccctctttgccctctgttcagga

SEQ ID NO: 3277 - DNA, 485 bp, Homo sapiens
  misc_feature (1)..(485): n=a,t,g or c
tttttttttcctttaaaaaaattatttttattgtggtaaaacatatataacataaaatttaccattttaaagtacacaattcattggcattaagtgcattcacaatgctgtataaccaccacaacggaacttttgttatagagcttttcttcatcgctatgaaggagtaatccttttaaacataagtcacaggcatgtcactaccctgcccgcaaacattcagtgggcttcccatcttggctcagcaaggggacaaagtcctggccgtggcccacagagcttttggctgtcctctctgaacgctctcttcactcatttcacccggtcattgggcttccttggctggtccctttggacaaagtggaccctggctttctccttcaggggtctctggcatgtgtttttttcctttgctgggaatgctctttttccntggganatccatgtantccccatttcattcaggagctntcctnaggatatca

SEQ ID NO: 3278 - DNA, 566 bp, Homo sapiens; identical to SEQ ID NO: 2793
  misc_feature (1)..(566): n=a,t,g or c

SEQ ID NO: 3279 - DNA, 262 bp, Homo sapiens
gtaggctttcttgtttaatagcagttaaaagaggaaaatgtacaagaggaataaacatgctcttttcacagaggagctttcccctaaccatgcggcccatctgtatcagtagctttacaagtaagttttagagaaaaaagttccctttagagttaaaaatggactttcctaattttctctatatatgtgcaactatctgtgtaaaataaaaatgccatttccaacacctttgtgaaaaggtaattgtgaatgcagggcaaaa

SEQ ID NO: 3280 - DNA, 294 bp, Homo sapiens; identical to SEQ ID NO: 214
  misc_feature (1)..(294): n=a,t,g or c

SEQ ID NO: 3281 - DNA, 401 bp, Homo sapiens; identical to SEQ ID NO: 2898
  misc_feature (1)..(401): n=a,t,g or c

SEQ ID NO: 3282 - DNA, 396 bp, Homo sapiens
  misc_feature (1)..(396): n=a,t,g or c
ntanacccatactttttatttgttaatttcatcacccccctcttcttctgatgtggtccccaccacctctgacatgcacgcattggctagggcctctcacactgaggctccacgcgaagggaagatgcaaagtccagtccctccaggagctagtgatggaagtcttgggaaaggagagtcccaagttcaagaagacagctagggtagaagggagggaggtcctcaaggggtagaggacaggagtccaaggaggtgggctcaggntgcggggtgggcgcctcagggagagcccagaaatctttccaggggcagcactntcttggaacaggggctnttgcacttnacgggtaccccgcattttttcattccccaaccttcagttgggccccccattgc

SEQ ID NO: 3283 - DNA, 231 bp, Homo sapiens
atttgaaggttaattacacgggcctttttattccatctggaaaatacaaatattcacaagagtctgtacaaccttagggacaccagccctggccctgccctcagctgcatgccaccctcatatcccacccccatccccagcctcctgccccgacacccccaggctccctgctctggttgaagtattttctccaaggcaggaatgagtccttgatccaaccacagcatctat

SEQ ID NO: 3284 - DNA, 319 bp, Homo sapiens; identical to SEQ ID NO: 2213

SEQ ID NO: 3285 - DNA, 349 bp, Homo sapiens
tttatttaaagatttaaggtttttttaattcagtaaactttatttatatataacaacagtacaaattgtgtcctcagcttgcaaaataggagtgtttcatatttacaataggtacacaataatatattagaataacaaaaaaccccactttattggaacattttaaatacttaattttcttacagtttttattccacaacacctgtaaaaacaacaaaaccagacaaccatcattgtattttcttaaaaatatatataatacagattccagtgtgtttgaggagtgggtttgagcaggaaaagttgtggggaaggcaggtgggctccggcccctagtctcatgggatag

SEQ ID NO: 3286 - DNA, 349 bp, Homo sapiens
  misc_feature (1)..(349): n=a,t,g or c
tttcaagtttaatttttaatttattagaacccagtaaatgatgattttaaaagnagagtttccatcaaattaacacttaattcagggcaaaanttcatttaaaaaaaatatttnttaaggcagaagtaaatnattataaaaatagtttgtctaatacagactgtaaaatgtcagatttttaagagattcacatagtattttatagcactaaaatattaatacagtcagaaatattatcaattggtccaagatttctgtttataaaatgtctagactgctaattgaagaaatgttgctgtataagtaatagctacaatacaaccaaccaagtggattgttttttatgaca

SEQ ID NO: 3287 - DNA, 338 bp, Homo sapiens
tttttttttttttttttcatttttcatgaccatttttattaaaaaataatttagttctgggtgggaccatttcaggaggcagggattggggctaggggctgggcggggtggtgggggagcggatctcacttttctctttttcaccctctgcccagctggcctttgctctggagaggcagtctctttcctcctgccttcctgagtaaggcaggattggcagtggctgaccccagccctagctatttagggaggcaggggcagagatactaggcaaatgagaaggggtcagagacacagggcggcttagaagatttgaggtctgaacatgagaaatgagg

SEQ ID NO: 3288 - DNA, 523 bp, Homo sapiens
  misc_feature (1)..(523): n=a,t,g or c
ttggtntgggggnactttaaatacatctttattgtctgaattttttacataagaatatatcattttataaattaaaataaaatttcaaactaagtggtaagagttttaaaatctctaaactgtatagatgatagagagagaaagatctagattggtccatagttatttctaagatacatttactgaaagttgacactataggatttggctgacatgacaagaagaacatgaagaaaattatccttttaggattaaaagaaaaaagcaactaatttcgaatcatctagggtaaaatgaattaatataccttgaatgggaagtccacaccaatttcaaattggcctgggtacttcatctgccctctcttctttgctaattggccaatttgctaagggatgaaccaggacacnggatgccttttatcagccgggaatttcacctacccttttcgggactgcctcaaataagggtttccaccnatttaggcctgccctcaaggagncctgagccngggaggtctnag

SEQ ID NO: 3289 - DNA, 298 bp, Homo sapiens; identical to SEQ ID NO: 1786
  misc_feature (1)..(298): n=a,t,g or c

SEQ ID NO: 3290 - DNA, 492 bp, Homo sapiens
  misc_feature (1)..(492): n=a,t,g or c
ttttttttttatcagactaagcaacttgatgaccaggaccatatcccctatttcttagtattctcttcagcattttagccagagtaggagtcggtgttgaatacaagtttgtcatcttatggattatatcttagggtgaatatcagagctggtgtccatcatgtgaacaggcagcatggtactggtggggagaggggtggaagtacagagtactagggccccaggagctaatattgctaacttgacaatattggtaaaagctagaccngttaagaactaccngcaatggttagtactgaaagcaaaaggggaaggattcatcaggctaaaataaaaaggggaaactagcaggttgggcataggggcagaacccangggaaaaccaaaaccaaaaccccccaaaaaactactaggatttccccgaaaagtggggaaaagcccnaaatctccaggnccatttaatgacagccaggtatttnccaaatgtagggg

SEQ ID NO: 3291 - DNA, 493 bp, Homo sapiens; identical to SEQ ID NO: 221
  misc_feature (1)..(493): n=a,t,g or c

SEQ ID NO: 3292 - DNA, 2512 bp, Homo sapiens; identical to SEQ ID NO: 2425

SEQ ID NO: 3293 - DNA, 1908 bp, Homo sapiens
gggacgtcagcggacggggcgctcgcgggccggggctgtatggggctcccgcgcgggtcgttcttctgggtgctgctcctgctcacggctgcctgctcggggctcctctttgccctgtacttctcggcggtgcagcggtacccggggccagcggccggagccagggacaccacatcatttgaagcattctttcaatccaaggcatcgaattcttggacaggaaagggccaggcctgccgacacctgcttcacctggccattcagcggcacccccacttccgtggcctgttcaatctctccattccagtgctgctgtggggggacctcttcaccccagcgctctgggaccgcctgagccaacacaaagccccgtatggctggcgggggctctctcaccaagtcatcgcctccaccctgagccttctgaacggctcagagagtgccaagctgtttgccccgcccagggacacccctccaaagtgtatccggtgtgccgtggtgggcaacggaggcattctgaatgggtcccgccagggtcccaacatcgatgcccatgactatgtattcagactcaatggagctgtgatcaaaggcttcgagcgcgatgtgggcaccaagacttccttctatggtttcactgtgaacacgatgaagaactccctcgtctcctactggaatctgggcttcacctccgtgccacaaggacaggacctgcagtatatcttcatcccctcagacatccgcgactatgtgatgctgagatcggccattctgggcgtgcctgtccctgagggcctagataaaggggacaggccgcacgcctattttggaccagaagcctctgccagtaaattcaagctgctacatccggacttcatcagctacctgacagaaaggttcttgaaatcaaagttgattaacacacattttggagacctatatatgcctagtaccggggctctcatgctgctgacagctttgcatacctgtgaccaggtcagtgcctatggattcatcacaagcaactactggaaattttccgaccactatttcgaacgaaaaatgaagccattgatattttatgcaaaccacgatctgtccctggaagctgccctgtggagggacctgcacaaggccggcatccttcagctgtaccagcgctgaccccaatgcactgagcgctttgcttcttcaagagttgcggccctgatcctctcaagtggccaaaagcttttttaacttttcaatcttcaccttcccttgccaacagagggcactggggtgaattcaagattttcatcgaggtctgttcaatataggacaccccagcttgtccttggctcatccaagaactcttctgtatctaaaacaatacatctcaatcttggccaagggaaaatggactgctttgctggattggcactgagcaactttaggaaatgtcggtggagtgttcagcaagatcagacagcagtccaggtcaaaggcaaacacacacgctccagcccaaatcctcctggtggcacatcctaccccagatgctaaagtgattcaaggactccaggacacctcttaagagcctttctaagaacatgataggcttacttctgctccataataaagtgggagaaaaaagccagaatataacttaagactagataactgcgtacatgatggaccattttttttttttttggctgggtagagaaatcatataaaacgcaggctgtttagcatggagatgactctcagaacactgggagggtctggcacttgatgggggttagttgcttggcagcctgcctgccactgagggaagtcccattagagatgtatcaccaccttgtcaccaacaggatgatgtcaccaacaggatgatgtcaccaggtaataaaccttcatcctcac

SEQ ID NO: 3294 - DNA, 3100 bp, Homo sapiens
actcgtctctggtaaagtctgagcaggacagggtggctgactggcagatccagaggttcccttggcagtccacgccaggccttcaccatggatcagttccctgaatcagtgacagaaaactttgagtacgatgatttggctgaggcctgttatattggggacatcgtggtctttgggactgtgttcctgtccatattctactccgtcatctttgccattggcctggtgggaaatttgttggtagtgtttgccctcaccaacagcaagaagcccaagagtgtcaccgacatttacctcctgaacctggccttgtctgatctgctgtttgtagccactttgcccttctggactcactatttgataaatgaaaagggcctccacaatgccatgtgcaaattcactaccgccttcttcttcatcggcttttttggaagcatattcttcatcaccgtcatcagcattgataggtacctggccatcgtcctggccgccaactccatgaacaaccggaccgtgcagcatggcgtcaccatcagcctaggcgtctgggcagcagccattttggtggcagcaccccagttcatgttcacaaagcagaaagaaaatgaatgccttggtgactaccccgaggtcctccaggaaatctggcccgtgctccgcaatgtggaaacaaattttcttggcttcctactccccctgctcattatgagttattgctacttcagaatcatccagacgctgttttcctgcaagaaccacaagaaagccaaagccattaaactgatccttctggtggtcatcgtgtttttcctcttctggacaccctacaacgttatgattttcctggagacgcttaagctctatgacttctttcccagttgtgacatgaggaaggatctgaggctggccctcagtgtgactgagacggttgcatttagccattgttgcctgaatcctctcatctatgcatttgctggggagaagttcagaagatacctttaccacctgtatgggaaatgcctggctgtcctgtgtgggcgctcagtccacgttgatttctcctcatctgaatcacaaaggagcaggcatggaagtgttctgagcagcaattttacttaccacacgagtgatggagatgcattgctccttctctgaagggaatcccaaagccttgtgtctacagagaacctggagttcctgaacctgatgctgactagtgaggaaagatttttgttgttatttcttacaggcacaaaatgatggacccaatgcacacaaaacaaccctagagtgttgttgagaattgtgctcaaaatttgaagaatgaacaaattgaactctttgaatgacaaagagtagacatttctcttactgcaaatgtcatcagaactttttggtttgcagatgacaaaaattcaactcagactagtttagttaaatgagggtggtgaatattgttcatattgtggcacaagcaaaagggtgtctgagccctcaaagtgaggggaaaccagggcctgagccaagctagaattccctctctctgactctcaaatcttttagtcattatagatcccccagactttacatgacacagctttatcaccagagagggactgacacccatgtttctctggccccaagggaaaattcccagggaagtgctctgataggccaagtttgtatcaggtgcccatccctggaaggtgctgttatccatggggaagggatatataagatggaagcttccagtccaatctcatggagaagcagaaatacatatttccaagaagttggatgggtgggtactattctgattacacaaaacaaatgccacacatcacccttaccatgtgcctgatccagcctctcccctgattacaccagcctcgtcttcattaagccctcttccatcatgtccccaaacctgcaagggctccccactgcctactgcatcgagtcaaaactcaaatgcttggcttctcatacgtccaccatggggtcctaccaatagattccccattgcctcctccttcccaaaggactccacccatcctatcagcctgtctcttccatatgacctcatgcatctccacctgctcccaggccagtaagggaaatagaaaaaccctgcccccaaataagaagggatggattccaaccccaactccagtagcttgggacaaatcaagcttcagtttcctggtctgtagaagagggataaggtacctttcacatagagatcatcctttccagcatgaggaactagccaccaactcttgcaggtctcaacccttttgtctgcctcttagacttctgctttccacacctgcactgctgtgctgtgcccaagttgtggtgctgacaaagcttggaagagcctgcaggtgccttggccgcgtgcatagcccagacacagaagaggctggttcttacgatggcacccagtgagcactcccaagtctacagagtgatagccttccgtaacccaactctcctggactgccttgaatatcccctcccagtcaccttgtgcaagcccctgcccatctgggaaaataccccatcattcatgctactgccaacctggggagccagggctatgggagcagcttttttttcccccctagaaacgtttggaacaatgtaaaactttaaagctcgaaaacaattgtaataatgctaaagaaaaagtcatccaatctaaccacatcaatattgtcattcctgtattcacccgtccagaccttgttcacactctcacatgtttagagttgcaatcgtaatgtacagatggttttataatctgatttgttttcctcttaacgttagaccacaaatagtgctcgctttctatgtagtttggtaattatcattttagaagactctaccagactgtgtattcattgaagtcagatgtggtaactgttaaattgctgtgtatctgatagctctttggcagtctatatgtttgtataatgaatgagagaataagtcatgttccttcaagatcatgtaccccaatttacttgccattactcaattgataaacatttaacttgtttccaatgtttagcaaatacatattttatagaacttc

SEQ ID NO: 3295 - DNA, 3128 bp, Homo sapiens; identical to SEQ ID NO: 2063

SEQ ID NO: 3296 - DNA, 2279 bp, Homo sapiens
cctgggccggatgtcccgatgagagagccgcgctgacggccagcgccatggcttaccacccgttccacgcgccacggcccgccgacttccccatgtccgcctttctggcggcggcgcagccctccttcttcccggcactcgcgctgccgcccggcgcgctggccaagccgctgcccgacccgggcctggcgggggcggcggccgcggcggcggcggcggcagcagcggccgaggcggggctgcacgtctcggcactgggcccgcacccgcccgccgcgcatctgcgctccctcaagagcctggagcccgaggacgaggtggaggacgaccccaaggtgacgctggaggccaaggagctgtgggaccagttccacaagctaggcacggagatggtcatcaccaagtccgggaggcggatgttcccccccttcaaggtgcgagtcagcggcctggacaagaaggccaagtatatcctgctgatggacattgtagccgctgacgattgccgctataagttccacaactcgcgctggatggtggcgggcaaggccgaccctgagatgcccaaacgcatgtacatccacccagacagcccagccacgggggagcagtggatggctaagcctgtggccttccacaagctgaagctgaccaacaacatctctgacaagcacggcttcaccatcctaaactccatgcacaagtaccagccgcgattccacatagtgcgagccaacgacatcctgaagctgccttacagcaccttccgcacctacgtgttcccggagaccgacttcatcgccgtcactgcctaccagaatgacaagatcacacagctgaagatcgacaacaacccgtttgccaagggcttccgggacaccgggaacggccggcgggagaaaaggaagcagctgacgctgccgtctctacgcttgtacgaggagcactgcaaacccgagcgcgatggcgcggagtcagacgcctcgtcgtgcgaccctccccccgcgcgggaaccacccacctccccgggcgcagcgcccagtccgctgcgcctgcaccgggcccgagctgaggagaagtcgtgcgccgcggacagcgacccggagcctgagcggttgagcgaggagcgtgcgcgggcgccgctaggccgcagcccggctccagacagcgccagccccactcgcttgaccgaacccgagcgcgcccgggagcggcgttgtcccgagaggggcaaggagccggccgagagcggcggggacggcccgttcggcctgaggagcctggagaaggagcgccccgaagctcggaggaaggacgaggggcgcaaggaggcggccgagggcaaggagcagggcctggcgccgctggtggtgcagacagacagtgcgtcccccctgggcgccggacacctgcccggcctggccttttccagccacttgcacgggcagcagttctttgggccgctgggagccggccagccgctcttcctgcaccctggacagttcaccatgggccctggcgccttctccgccatgggcatgggtcacctactggcctcggtggcaggcggcggcaacggcggaggtggcgggcctgggaccgccgcggggctggacgcaggcgggctgggtcccgcggccagcgcagcaagcaccgccgcgcccttcccgttccacctctcccagcacatgctggcatctcagggaattccaatgcccactttcggaggcctcttcccctacccctacacctacatggcagcagcagccgcagccgcctcggctttgcccgccactagtgctgcagctgccgccgccgcagccgccggctccctctcccggagccccttcctgggcagtgcccggccccgactgcgtttcagcccctatcagatcccggtcaccatcccgcctagcactagcctcctcaccaccgggctggcctctgagggctccaaggccgctggtggaaacagccgggagcctagccccctgcccgagctggctctccgcaaagtaggggccccatcccgcggtgccctgtcgcccagtggctcggccaaggaggcggccaatgaactgctgagcatccagagactggtgagtgggctggagagccagcgagccctctccccaggccgggagtcgcccaagtgaggggctgcccagctgctcccctgccacgcaggccacccgggctgcctgcccctgctgcttgggacgtgtacagcacagaatgagtatttatttaaataaaggagaaaagtgggctgcagccgg

SEQ ID NO: 3297 - DNA, 10716 bp, Homo sapiens
agggggcggcgctcccggccatcccttagccccgcggcggccgtgtgggccggaggctgcctgcaccgcgtcagggaggccggcctagaaaccctccctcccagaagaaagccgatcccagttcaggtggggtcttcctcggttgcgtacctggctggagccgagctggtgggcggccggcagccggcgtttctggtgatgacagccccgaaatgaaagcagcgcggccgccgcctccgagggctgcagggagatcagcgtccagcaaataagaagcaagtcctggacccggaggaggaggagcggccgagcatctctctctgctccgccgtgtcctttagatgagcactcccggccggagccggaggtggatccgcagagctgcctctgggcgcctgaccccgcgctgacatcacaacctgtgacaggcgcatcacgcccggtacctgctcccggccgctgtccgtcctcccagcctctttgtatgccgcagacatggccagccagcaggattcgggcttctttgagatcagtatcaaatatttactgaaatcctggagtaatacttctcccgttggcaacggttacatcaagcctccggttccacctgcttctggcacgcacagggagaaagggccgccaaccatgctacccatcaatgtggacccagacagtaaaccaggagaatatgtcctcaaaagtttatttgtcaacttcaccactcaggctgaacgcaagattcgtatcattatggcagagcccctggaaaagccattgacaaaatctctgcaacgtggagaagagccccaatttgatcaggtcatcagctcaatgagctccctttctgagtactgcctgccttccattctacgtacattatttgactggtataaaaggcaaaatggcattgaggatgaatcacatgaatacagaccaagaacaagcaataaatcaaaaagcgatgaacaacagcgagattatttaatggaaagacgggacctcgccattgattttattttttctttagtattaatagaagttttgaaacagattccacttcatcctgtaatagacagtttaatacatgatgttattaacttggctttcaagcactttaaatacaaagaagggtaccttggtcccaacactggcaatatgcatattgtggcagacctgtatgcagaagtcattggagtgttggcacaagccaaattccctgctgtaaagaagaaatttatggcggagctaaaagaattacggcacaaagagcagaacccatatgtggttcaaagcattatcagcttaataatgggcatgaaattctttcgaattaagatgtatccagtggaggattttgaggcctctcttcagtttatgcaggaatgtgcacattacttcctcgaggtcaaagacaaagatatcaagcatgccttggctgggctttttgttgaaatacttgttccagttgctgctgctgttaaaaatgaagtaaatgttccctgccttagaaattttgtggaaagcctgtatgacaccacgctggaactttcttctcgaaagaagcattccctggccttgttccccctggtgacctgtttgctctgtgtcagtcagaagcagctgttcctgaacaggtggcacattttcctcaacaactgcttgtccaaccttaaaaacaaagatcccaagatggctcgagttgcactggaatctctctacagattactttgggtttacatgattcgaattaaatgtgaaagcaacacagctactcagagccgacttataaccatcatcacaacacttttccccaaagggtcccgcggtgtggtaccaagggacatgcctctgaacatctttgtgaaaatcatccagttcattgcccaggaacgtttagattttgcaatgaaagaaatcattttcgattttctttgtgtgggaaaaccagcaaaagcattcagtctcaacccagagagaatgaacattggtttacgggcattcttggtcatagctgatagcttgcagcagaaagatggggaacctcccatgccggttacaggagccgttcttccttcaggaaacacgttaagagtaaagaaaacatatttgagtaaaacactaactgaagaggaagccaaaatgataggcatgtccttatattactctcaagtacgaaaagctgtagacaacattttaaggcaccttgataaagaagtaggaaggtgtatgatgctgactaatgtacagatgttaaacaaagaaccggaagacatgatcacgggtgagagaaagccaaaaatagatcttttcaggacctgtgttgctgctattcctcgactgcttcctgatgggatgtcaaaacttgaacttattgacttactggctaggctctctattcatatggatgatgaattgcgacatattgcacaaaattctcttcagggtttacttgttgacttctcagattggagggaagatgtactattcggctttaccaacttcctgctccgggaagtaaatgatgtgcatcacacactccttgattcgtccctgaagttgctgctgcagctgctcacccagtggaaactagtcatccagacacaaggaaaagtctatgaacaagccaacaaaatcagaaattcagagctcatcgcaaatggctccagccacagaattcagccggaacgaggtccccactgcagtgtactccacgctgtagaaggttttgctctggtttcactctgtagtttccaggtggccacacgcaaactgtccgtcttaatactcaaggaaattcgagcgttgtttattgccctggggcagcctgaggatgacgacaggccgatgattgatgtcatggatcagctaagttcttccattctagaaagttttattcatgtagcagtttcggattcagcaacattaccactcacccacaatgtggatctgcagtggttggtggaatggaacgcagtcctggtcaatagccattatgatgtgaaaagcccttcccatgtctggatatttgcacagtctgtcaaagacccctgggtcctctgcctcttcagcttcctccggcaggagaacttacccaagcactgtcccacagccctcagctatgcctggccttatgccttcactcggctccagtcggtgatgcctctggtggacccaaatagcccaattaatgccaagaaaaccagcactgccggcagcggagacaactatgttactttgtggagaaattacctaattctttgttttggagttgcaaaacccagtattatgagcccaggacacttaagagcttccactccagaaataatggcgaccacacctgatggtacagtgagctacgataacaaggccataggcaccccatcggtgggagttctgttaaagcagttggtgcctttgatgagactagagagcattgagatcacagagtccttagttttaggatttggaagaacaaattcccttgttttcagagaattggtagaagaacttcatccattaatgaaagaagctctggaaagaagaccagagaacaagaaacgccgagaacggcgagacttgttaaggctacaactacttcgaatttttgaacttttggctgatgctggtgtaataagtgacagcacaaatggagccctagagcgggatactttagccctgggagctttgttcttagaatatgtggacttgacccgcatgctcctagaagctgaaaatgacaaagaagttgaaattcttaaagatatccgggcacattttagtgcaatggtggccaacttgattcagtgtgttccagttcaccaccgaagatttctcttcccccagcaaagtctgaggcaccaccttttcatcttattcagccagtgggcaggacccttcagcattatgttcactcctctggatcgttacagtgacagaaatcatcagattacaagatatcagtattgtgcattagaagcaatgtcagcagtactgtgctgtggccctgtctttgacaatgtgggcctttccccagatggctacctatataaatggcttgacaacattctggcttgtcaagatttacgagttcatcaacttggctgcgaagttgttgtcttgctactggaacttaatcctgaccaaataaatctttttaactgggcaattgaccgatgctacacaggttcctaccaacttgcatctggctgcttcaaagccatagcaactgtgtgtggaagcaggaactatcccttcgacatagtgacattgttaaaccttgttctattcaagacctctgacaccaacagagagatttatgtaatctccatgcagctcatacagatccttgaagcacagctttttgtatactcagagaaagtctctgagcaaagaccgggaagtattctctatggaacacacgagccgctgccacccctctacagcgtgtcacttgccctcttgtcatgtgagctggccaggatgtaccctgagctcacactccccctcttctcagaggtaaaccagcgattcgccacaacacaccccaacgggcgccagatcatgcttacctacctgctgccctggctgcacaacatcgagctggtggacagcagactcctcctcccggggtcgagccccagcagcccagaggacgaagtcaaggaccgggaaggtgacgtgactgcttctcacgggctgagaggaaatggctggggctctccagaagccacgtcactggtcctgaacaacctcatgtacatgacggccaagtatggagatgaagttcctgggacagaaatggaaaatgcttggaatgctttagccaacaatgagaaatggagcaacaacctgaggatcaccttgcagttcctgattagcctctgtggggtcagcagcgacacagttctcctaccctatattaaaaaagtggcaatatacttgtgccgtaacaacaccattcaaaccatggaagagcttctctttgagctgcagcagacagagcccgtgaaccccatcgtccagcattgtgacaacccgcccttctaccgcttcacggccagtagcaaggcttccgcagcagcctcaggaaccacctctagcagcaatacagtggttgctggccaggaaaatttcccagatgctgaggagaacaagatattgaaagaatctgatgaaaggtttagtaatgtcatcagagcccacactcgcctcgagtcaagatacagcaatagctctggaggatcctacgatgaagataaaaatgatccaatttctccctacacgggctggttgctgactattacagagaccaagcagccgcagcccttaccgatgccttgtactggaggatgctgggcccccctggttgactatctcccggagaccatcactccccgggggccactccacaggtgcaatattgctgtaatttttatgactgaaatggtggtggatcacagtgtacgagaagactgggcgcttcatctaccattattacttcatgctgtcttcttaggtttagaccactaccggcctgaagtctttgaacacagcaaaaaactgcttcttcacctcttgattgccctctcttgcaacagcaatttccattccattgcttccgtgctcctgcagacccgagagatgggtgaagctaagactctaaccgtgcagccagcctaccaacctgaatatctctatacaggtggctttgacttcctgagagaggaccagtcatccccggtgcctgactcagggcttagttcaagctccacctcctctagcatcagtctgggaggcagcagtggaaacctcccacagatgacccaggaggtagaagatgtggacacagctgctgaaacagatgagaaggcaaacaagctcattgagtttctcacgaccagggcatttggtccactttggtgccatgaagacatcacacctaaaaatcaaaattcaaagagtgctgaacagctcactaattttctacgtcacgttgtatctgtatttaaagattccaaatcaggcttccatctggagcaccagttgagtgaagttgcattgcagacagccctcgcaagctcttcaaggcactatgctggtcggtccttccagatattccgggccctcaagcaacctctgtcagcacatgccttatctgaccttctctcaagattggtggaggtgataggagaacatggagatgagattcagggttatgtaatggaagcgctcctaaccttggaggcggctgtggataacttgtctgactgcttgaagaacagtgacctcctaactgtattgtcccgctcttcctcaccagatttaagctccagcagtaaactaacagcaagcagaaagagcacaggacaactaaacatgaacccgggaaccaccagcggcaacaccgcaactgccgaacggagccggcatcaacgaagcttctctgtgcccaagaagtttggtgtcatcgaccgatcctctgacccacctcgaagtgccacactggacagaattcaggcttgtacccaacaaggcctctcctcaaaaaccagaagctcatcctccttgaaggacagtctcacggacccatcccacataaaccatcccaccaacctgctggccaccatattctgggtcacagtggccttgatggagtctgattttgagtttgaatacttaatggccttaaggctgttgagcagactactggcacatatgccactcgataaggctgagaaccgagaaaagcttgagaaactccaggcacagctgaagtgggccgacttctccgggctgcagcagctgctgctgaaaggattcacatccctcaccaccacagacctgaccctgcagctcttcagtctgctgacaccagtgtccaaaatatccatggtggatgcatcccacgctattgggtttccactgaatgtcttgtgtctcctgcctcagctgattcagcattttgaaaatcccaatcagttctgtaaggatatagccgaaaggattgctcaggtttgtttagaagagaagaaccccaaactttcaaatcttgcacatgtcatgactctttataaaacgcacagctacacgagggactgtgccacgtgggtcaatgtggtctgtcgataccttcatgaagcatatgctgacattaccttgaatatggttacctacctggcagagctgctggagaagggcctccctagtgtgcagcagcccctgctccaggtgatctacagtcttctcagctacatggacctttctgtcgttcctgtcaaccagttcaatgtggaagttctgaagacaattgaaaaatatgtgcaaagtgttcactggagagaagctctgaatatcttgaagctggtagtttctcggtcagccagccttgttttaccttcataccagcacagtgacctctcaaaaatagaaatacatcgagtgtggactagtgcttccaaggaattacctgggaaaaccctggacttccacttcgatatttcggagactccaatcatcgggaggcggtatgatgagctgcagaattcttctgggcgtgatgggaagcccagggccatggccgtcacccggagcacatcttccacttcctcaggctccaactccaacgtccttgttccagtgagctggaaaaggccccagtattctcagaagagaacaaaagagaagttggtacatgtcctttctctgtgtggccaagaagtaggattgaccaaaaatccatcagtgattttttcatcgtgtggggatctggatctgcttgagcaccagacaagcttggtatcttctgaggacggtgcccgagagcaggagaacatggatgacacaaacagcgagcagcagtttagagtcttcagagacttcgacttcctagatgtggagctggaggatggagaggaacttcagggtgagagtatggacaatttcaactggggagtgcgcagacgttctctggacagcctggataagtgtgatatgcagattctggaggagcgccaactgtcaggaagcactcctagcctgaataaaatgcaccatgaggactccgatgaatcatccgaggaggaggacctcacagccagccagatcctggagcactcagacctaatcatgactctctccccctctgaagagacgaatcccatggagctgctcaccacagcctgtgactcgacccctgcagaacctcattcctttaacaccagaatgtccagctttgatgcttccttgcctgatatgaataatctgcagatttctgagggttcaaaggctgaagctgttcgtgaggaggaggacaccaccgtgcatgaggatgatctttctagttccatcaatgaactcccagcagcttttgaatgcagcgacagctttagcctggacatgactgagggggaagaaaaaggcaatcgggcactggaccagtttaccctggcgagctttggagaaggtgacaggggagtctctccccctccctcgcccttcttctcagccatccttgccgcctttcagcccgcagcctgtgacgatgccgaggaggcctggcgcagccacatcaaccagcttatgtgtgactcagatggctcctgtgctgtgtatacatttcatgtgttctcctccttgtttaagaatattcagaaaaggttctgcttcctaacctgtgatgcagccagttaccttggagataacctccggggaatcggatccaaatttgtcagctcttcccagatgctcacctcctgctctgaatgtcctacactttttgtggatgccgagactctcctttcatgtggacttctggacaagctcaagttcagtgtgttagaactgcaagaatatttggatacctacaacaacaggaaagaggccacactctcttggcttgcaaattgtaaggcaacatttgcagggggatcaagagatggagtaattacctgtcaaccaggggactccgaagaaaagcaattggaactgtgtcagagattatataagctacacttccagctgctattgctttttcagtcctactgtaagctcatcggccaggtgcacgaagttagctccatgccagagctgctgaatatgtccagggaactgagtgacctaaagaaacacctgaaggaagccagtgcagtcattgcagctgaccctctctattcagacggcgcgtggtccgagcccaccttcacgtccactgaagcagccatccagtccatgctggagtgcctgaagaacaacgaactcggcaaagctttgcggcagatcagggagtgcagaagtctgtggcccaatgacatctttggaagcagttctgatgatgaggtccagacactactgaatatttatttccgtcaccaaactctgggacagacgggtacttatgccctggtggggtctaaccagagcctgaccgagatctgcaccaagctgatggagctgaacatggagatccgggacatgatccgcagggcccagagttaccgagtcctcactacttttcttccagactccagtgtttctggcactagtctctgacaggagcctcctgtccccactgggttccaaactggcagtgctgccatgctggggcaacgtcattcagtgtcttctcggccttcaaaaggcttggacagactgttctccctcttgttacctgtagggctttttctaaagaggatggcagaacttccaacgtgtagcaatactataagaaccaaggtagcttagaacgtcctggacagactccactcatcatgctgtgtggcacaaatgtgttacatttgaccgagcatatgcaactcgctactgaagaagtgacttccgttgcataccaaagccgactacactgaacagtaccttcctttctagaaacaattttagattggcaaaagtgcaatgttttcttcactcaaaaaattttatattctcaaacatgtatattctttccctgtcttgttccattttcttttcttttttcttttttctttttcctttctttcgtgggctgagaaaggggcaggcaaaatgaagctggccactgaaaactgtaagatggtcaaaagctgacagcctgtgtatgtgaaaagggaattgtaaatggactgcaatgtaatgtacactgtaatttgaatacaattactgtatctaaaaggagctgctatgaagtacctttcttatgttgctaggctactgtttctgaaagccctggatctctttgcaccaaaaatggtccagatagactctttttaaggatcttggctgctttttactagaaggttgcttttatgagcatatttatactgctgaaggatgagtgttaattttaattaactttgccgttttgtagagaaaactattcacaagataaattccaagtcttttcacctgtcaggcatgcatattttaatatctgtttggatagtcagaagtagaatcataaaggtaaaatatgagttgttactttgtttcttcgatgtcatattttatgtgtaatatatatgtaaagggccattcttaagttctctccttaaacttaatgctgtcaagtgttagatgtgtgcatgtgaacttgttgcactgcagaaacatattcagagtttatctatgtaacttattcactctgtaaatacatttaaagtttttgtgatgtaagcttaattgatattctgttcagaactttctttagrcgaagaaaaaaaaaaaaaa

SEQ ID NO: 3298 - DNA, 1023 bp, Homo sapiens; identical to SEQ ID NO: 251

SEQ ID NO: 3299 - DNA, 2784 bp, Homo sapiens
accaaaccgtcctctacagcctcctggccccggcgcaggctgcccgtactgcccgtggcatgagggagccggaagagctgatgcccgattcgggtgctgtgtttacatttgggaaaagtaaatttgctgaaaataatcccggtaaattctggtttaaaaatgatgtccctgtacatctttcatgtggagatgaacattctgctgttgttaccggaaataataaactttacatgtttggcagtaacaactggggtcagttaggattaggatcaaagtcagccatcagcaagccaacatgtgtcaaagctctaaaacctgaaaaagtgaaattagctgcctgtggaaggaaccacaccctggtgtcaacagaaggaggcaatgtatatgcaactggtggaaataatgaaggacagttggggcttggtgacaccgaagaaagaaacacttttcatgtaattagcttttttacatccgagcataagattaagcagctgtctgctggatctaatacttcagctgccctaactgaggatggaagactttttatgtggggtgacaattccgaagggcaaattggtttaaaaaatgtaagtaatgtctgtgtccctcagcaagtgaccattgggaaacctgtctcctggatctcttgtggatattaccattcagcttttgtaacaacagatggtgagctatatgtgtttggagaacctgagaatgggaagttaggtcttcccaatcagctcctgggcaatcacagaacaccccagctggtgtctgaaattccggagaaggtgatccaagtagcctgtggtggagagcatactgtggttctcacggagaatgctgtgtatacctttgggctgggacaatttggtcagctgggtcttggcacttttctttttgaaacttcagaacccaaagtcattgagaatattagggatcaaacaataagttatatttcttgtggagaaaatcacacagctttgataacagatatcggccttatgtatacttttggagatggtcgccacggaaaattaggacttggactggagaattttaccaatcacttcattcctactttgtgctctaattttttgaggtttatagttaaattggttgcttgtggtggatgtcacatggtagtttttgctgctcctcatcgtggtgtggcaaaagaaattgaattcgatgaaataaatgatacttgcttatctgtggcgacttttctgccgtatagcagtttaacctcaggaaatgtactgcagaggactctatcagcacgtatgcggcgaagagagagggagaggtctccagattctttttcaatgaggagaacactacctccaatagaagggactcttggcctttctgcttgttttctccccaattcagtctttccacgatgttctgagagaaacctccaagagagtgtcttatctgaacaggacctcatgcagccagaggaaccagattatttgctagatgaaatgaccaaagaagcagagatagataattcttcaactgtagaaagccttggagaaactactgatatcttaaacatgacacacatcatgagcctgaattccaatgaaaagtcattaaaattatcaccagttcagaaacaaaagaaacaacaaacaattggggaactgacgcaggatacagctcttactgaaaacgatgatagtgatgaatatgaagaaatgtcagaaatgaaagaagggaaagcatgtaaacaacatgtgtcacaagggattttcatgacgcagccagctacgactatcgaagcattttcagatgaggaagtagagatcccagaggagaaggaaggagcagaggattcaaaaggaaatggaatagaggagcaagaggtagaagcaaatgaggaaaatgtgaaggtgcatggaggaagaaaggagaaaacagagatcctatcagatgaccttacagacaaagcagaggatcatgaattttctaaaactgaggaactaaaactagaagatgtggatgaggaaattaatgctgaaaatgtggaaagcaagaagaaaactgtgggagatgatgaaagtgttcctacaggttatcacagtaaaacagaaggagcagaaagaaccaatgatgatagctcagctgaaactattgaaaagaaagaaaaagccaacctagaggaacgggccatttgtgagtacaatgaaaacccaaaaggatacatgcttgatgatgcagatagcagttcattagaaatcctagaaaacagtgaaacaacaccaagcaaagacatgaaaaaaacaaagaagatttttctgttcaaaagagtcccctcaataaatcaaaagattgtcaagaataacaatgagccgctcccagagataaaatccataggagaccagatcattttaaaaagtgataataaagatgccgaccagaaccacatgagtcagaatcatcagaatatcccaccaacaaatacagagagaagatcaaaatcctgtacaatactataaatatatatttatgttttcacagtcaccaagtgtattgtaatgtatacttgaaaaatgttataacttatgaagtaaagtttctgatagtagtctttaaaagatataagacttaatatgttttattcagcttctataagtgtgaccagttttgatatttatttatgctaatatttttaacaagtcatttcaaaatatgtgtatctcaaattctccctaaagtgttgtggccttaactgttcagtattgcaataaaaaatatatttttatatgtggaaaa

SEQ ID NO: 3300 - DNA, 170 bp, Homo sapiens
ctcctctcaggttttattgactgatgggaaactacatctttgtcagccaccagctccatggggacagtgctgggggacagggaacctgagatgatgccagatttcagcctgagagcagagttttggaaggtcacccaagagggagaagaaaggaatatgtgaaaaaggaa

SEQ ID NO: 3301 - DNA, 341 bp, Homo sapiens; identical to SEQ ID NO: 2329

SEQ ID NO: 3302 - DNA, 302 bp, Homo sapiens
cattttttaacaagcaaattttaataatgccttttatttctatacaaagcaatgtaactttctgaaaaaaaaaatggctatacagaaccctttaaacataagagtacagagtttcaaatggcaacaagaagttaagaaacatagggcactgtgtcgttatgggtgaatcctagtcgtcctgcagcccaaggtccaagctagtttactccataaccttaagtaaataaccgcggttcctatgaatacctttccaaaaccatttattataaaaactcactctttatccattatcagtattaacg

SEQ ID NO: 3303 - DNA, 406 bp, Homo sapiens
caatttagtcactatttattatattgacatatttacaaaataatacaaagtgaaataccactctaattcaccatattacacaagggctgcatacaggcaagacaaagtatatggaaaacatttacttctgtctttggtattagaactctacacaaatctgcagcatttaaattttccaaaacaaagtattaaacgtggacaaagatgtaattggtaatgtcacaaaaaggggctccaatatcctctgctaggaaacccccaggcccatgaaatgcaacaggaagactaaacaccatttataaggagagggtctattgactaaaataaacaatacatgctacaataccatccacaggagtgtttctgcttgtgtgaggctgctccctccataacaaagttcggctga

SEQ ID NO: 3304 - DNA, 384 bp, Homo sapiens
atcataaaacatctttttaatgtgaacactacttcatacaatgaaaaactatttacaatgtattgtttccagattggctgcttttacatcatctctacccatgtgctgactcggcatgtatcttcagccagggagcttcagtccaattgcacattctcctcgatcggctctccaaggaccccggggattcagggaacccgtccacttacattctctttagtaattatggctcagcaagcatgccaccaaaatcatctagaacccagagactctggcaaccccatataagtaaaaatgtgtagatcaggtttttttctccaataaataataatttgacaatccaatccatttccatcttaagaaattgttttcacttaggaaaat

SEQ ID NO: 3305 - DNA, 212 bp, Homo sapiens
  misc_feature (1)..(212): n=a,t,g or c
tccttttaatatgaggaggtctggtgtgaagacagatcaagcatgggtacctggcttgaacattgtccattaagaaaatgtatcagtctccgcatagcatcagtcaagggtcaaggaaaatgcccctgacttgcntgtgttctcagagtgtcttcgcagcacagtttntgaaattcaaatagtngttttgagacaaaaatnccgccaggtac

SEQ ID NO: 3306 - DNA, 189 bp, Homo sapiens
aagaaaaataactttgttattaatcatatacaatcataacaaaagtacatcatagtatcacatccataattgcttgaatgctaacttgactgttacatggacctgttacaaataatgaacaacagagctactccagtatatgactagtcactgtgaaataaaaacagacccatggcacacatggaaatt

SEQ ID NO: 3307 - DNA, 186 bp, Homo sapiens
gctggtcagaaagccatttaatccataaacacaaagacacatgaatgggcaaattctgtaaatgaaagcaatctggcaaaagcccttggtggtgagcttggtctccctcacaggcaatgacagtcttggccatgggtctagacaacacacaattccaatgcagcctaggaggacattatggaagtg

SEQ ID NO: 3308 - DNA, 454 bp, Homo sapiens
  misc_feature (1)..(454): n=a,t,g or c
taaaacagcatacatttattatctgaaagtttctgtgggtcaggagtccaaacgtgatttagctgggtcctctgctcagagtttcacaaagctgcaagcaaggcgttggctggggctgggcttttatctgaggttcagatgcttcttccaagatcacatggttgttcacaaaacttatttccttgcagccgtagagctcatggcagcttgcttatttaaggctaataggagagagagtctctgactggttcactctcttttaaaggactagtctgattaggtcaggcccacccaggggatctctttgattaactcaaagtcagctgattagaaaccttatgtatatctgcaacttctcttcacttttgttatataacataacataatatggggagagatgatcccatcactttttggccataatcnggttgggttaagaagcaggttacatggt

SEQ ID NO: 3309 - DNA, 430 bp, Homo sapiens
  misc_feature (1)..(430): n=a,t,g or c
gcagagtagtgttagaatagatggcctacagaaaaaaaaggttctgggatctacatggcagggagggctgcactgacattgatgcctgggggaccttttgcctcgagnctgagctggaaaatcttgaaaatattttttttttcctgtggcacattcaggttgaatacaagaactatttttgtgactagtttttgatgacctaagggaactgaccattgtaatttttgtaccagtgaaccaggagatttagtgcttttatattcatttccttgcatttaagaaaatatgaaagcttaaggaattatgtgagcttaaaactagtcaagcagtttagaaccaaaggcctatattaataaccgcaactatgctgaaaagtacaaagtagtacagtatattgttatgtacatatcattgttaatacagtcctggg

SEQ ID NO: 3310 - DNA, 413 bp, Homo sapiens
  misc_feature (1)..(413): n=a,t,g or c
ttactaccagcgtgaacaaccagcatttttattgcatttgagaatgcttataatgtcagtaattagtactgactacacaacatttttttattgtctgtatccgcagacatggaatgatggaattacagttgatgtcaaggaatgagtttcttttatgccttatcaaaacaaaacaaaacaaaacaaaaaaattcttgttactggcagcacatatacatgaagcaccatgctcacagtccggactgtatcatcttcatcaaggcttatgggtagcagagattgcgtgantaacactgggcccaagaaaatgccttcagcattgtaaaatctggattttcagggataaagaagcaaaactggactttgaagacatccagaatttcaggagggnatggtcattaaccaaaaggtag

SEQ ID NO: 3311 - DNA, 282 bp, Homo sapiens
  misc_feature (1)..(282): n=a,t,g or c
tatcatttttaatngctttattcattgattaaaagaatatacatttaacataaaccatacaacatcagtcatcaggtcaaacattcagctggtttccttacagtttctgtcaggagttattttatctgatcacatttataagataaaatctcaccacatctggcatttacacacactgtgccagtggattcacactactgatgtacatataaaatccgcatggtatgtgctcactggagacaaaacagtgcacacctgtcaaaaggtcattttaactaataa

SEQ ID NO: 3312 - DNA, 874 bp, Homo sapiens; identical to SEQ ID NO: 2043

SEQ ID NO: 3313 - DNA, 2834 bp, Homo sapiens; identical to SEQ ID NO: 311

SEQ ID NO: 3314 - DNA, 1523 bp, Homo sapiens; identical to SEQ ID NO: 825

SEQ ID NO: 3315 - DNA, 247 bp, Homo sapiens
  misc_feature (1)..(247): n=a,t,g or c
ggtgatgcagatttcaacagtaactctggaaaactgtgaaaaatgttatttaaaaatatatatgtatatgctactgacagtttcaaagatgtgattcataaataatgttggctgcactgattaattttataacaattactgcacttccaagttgatgcgaacacgcagnacntcatactcaatattaggcactagtaatatccttcaggcgtactacagttttatgttagctgtattgtacatatat

SEQ ID NO: 3316 - DNA, 365 bp, Homo sapiens
  misc_feature (1)..(365): n=a,t,g or c
gttcatttttggagtaggtttccttggtggtttttaggacatatttgttggtaaacctataacagttgcttttactttcagtgatgtactttttncttttcctgcttcccagagatttatcagaggaggataaagctcacctaatgcaaaggttggtttctgtaagtaattcctcacatagctgtgtccaccatcacagttcatttctggagagaggcagctgataagacatatcacaccaataatccccagaaggcctccaagacaggccataagtgttgtggtattattcttttcatactctttttgatcagggtgcaaacctttggtggtgacatttacacatttttttctgtttttctgat

SEQ ID NO: 3317 - DNA, 332 bp, Homo sapiens
acatttaagtgttccatttatttttaaatgcatcagaaaagcaattatgatagatctgtgaccaatacaaacatttctgatttattcaaaaaattcagttaaaaaagtcattaaactagcattctgtaaagataattattaaacaaatggtaatgcatttttactccttatttcatttctaacatacccaatgtcacttctttcttgtgccatacagtaataaaatgtaacagaaatagatatctattaaattttgggggcctaataaaatatttttgattattcaactgtcattaaatcacaaatcccactcaagtaatgaaaatcattct

SEQ ID NO: 3318 - DNA, 1305 bp, Homo sapiens
  misc_feature (1)..(1305): n=a,t,g or c
ngcggcagcagcagcagcaacagcaactgcgaaacctgcgtgacttcctgttggtctacaatcggatgacagaactctgcttccagcgctgtgtgcccagcttgcaccaccgagctctggacgctgaggaggaggcctgtctgcacagctgtgctgggaagctgatccattccaaccaccgcctcatggccgcttacgtgcagntcatgcctgccctggtacagcgccgcatcgcagactacgaggntgcctcggctgtgccaggcgttgntgctgaacagcctggggtctctccatcaggcagctagccatacccaaccccaggaaggaaggccttggatggaccctcaagattgaaggacccggtnggaccttggggttggtgaatcctaaacagagagaattcgaggttgcctgaaagctgggttgtccttgctccttttcctggagncaatatacccagtttttactcagtggtgatttatattctgntnaaggaagcttggcctactttattggaacaatccggggtnctgtcgtttagtgaatatctgctggntncagccctggnagntgagaaattgtnttctatntgtngaaggaaaccctgagtatgggnaggcatctggttaaagnagggtctgtgtgtacaattttaaaacgggtaatatgtcatgctcttagcncatctccacaancaaactatgagtaagcggtattagcctcacttaacagatgaggaagcaagcttccagaaagtaccagaaggtcattttatacaacaggagattggttcctgcccagatgacagaaaatgggagctctgtctagttgtccttaagtctgactgacttcagtggctcataaccgtgagccaagtatttgttggntcataactgttgttttgtgaactatgtcttacatgtctagagttctgctggatctagggaaaggaggagntatcgaagtacaacggatcaaaaaaccacagggcttttggggcactgcctccttgggaagttagtggccacagaagagagatgaaacctgtaagaagtcttggagtcttttgggaacttcagccatttccccaggttgttactttcttagtatgtacagtcttctcaggatgagcagtaaaacctttgaacaaaggtctgtgtggttgtcttcacgggcaatcaggaagggagagagctggggaccatattctgcaatgcagccaantccgaggaagagaaactgaagggagaagtagatggcaatggntatgataaaaagggataaaactaaatcttcgggact

SEQ ID NO: 3319 - DNA, 43058 bp, Homo sapiens
gatcacgccattgcactccaccctgggcgacagagcgacgagaccccgtatcaaaaaaaaaaaaaagaaagaaagaaagaaaaaagaaaaaaaaaaggccgggcgcggtggctcacgcctgtaatcccagcactttgggaggccgaggcgggtgaatcacgaggtcaggagttcgagaccatcctggccaacatggtgaaaccccgtctctacaaaaaaaaaaaaaaaaattagccgggcgtggtggcgggcgcctgtaatcccagctactcgggaggctgagacaggaaaatcgcttgaacccgggaggcggagcttgcggtgagccgagattgcgccactgcactacagcctaggcgacagagcgagactccgtctcaaaaaaaaaaaaaaaaaaaaaaaacacttggaagccgacaggagatctttgagaccttgggcgaggcagtgacactaaaggcaggagcgactacagaagaataaattaaacttcatcagattaaaaactttactgcggccgggcgcggtggctcacgcctgaaatcccagcactttgggaggccgaggtgggcagatcatgagatcaggagatctagaccatcctggccaacatggtaaaaccccgtctctctactaaaaatacaaaaattagctgggtttggcggcgcctgcttctaatcccagctactcgggaggctgaggcaggagaatcgcttgaagccgggaggcggaggttgcagtgagccgagatcgtgccactgaactctggcctggcgacagagcgagactccatctcaaaacaaaacaaaaacttcggtgctttaaaggacaccatcaagaaaattaaaagtccacccacagaacgggagaaaatatttgtaagttacatatctgataagggaattgtatctagaatggaggaaacttacaactcaacaataaaaagacaattgaaaaatgcacaaaggatatgaatatttttccagtgcattatgcaaatggccaataagcaccagaagatgctcagctcaactggtagaggcttacgcctgtgaccccagcgctgagaggccaggaactccagaccagcctgggcaaaacagaaattaaaaatgctcaacattattaggcattagggagatgcaaatcaaaactacaaatagatgccacatcacacctcctacgatggctgtaatcaaaaagacaagcgtcagcaggggtgtggagaaacgggaatctctctcctgctggtgggaatgtaagaggctacactcgctatggaaaacaggctggcagttcctgaaaggttagagttaacacaacactcggcaaatcccccttttagatatatagccaagagaaatgaaagcatatgtccacacaaaaacatgtgtgttcttagtaatattattcataatagcccaaagtggaagcaatcctagggtatatcaattgatgaatgggtgaatatggtatagtttgtttaagggaatactattcagccataaaaaggaatgaagtacggcacatgaatccatcttgaagacacactaatatatgattccatttatataagatgcccagaataggcaaatccatagagacagaatgattagtggctgcctagggcttccagggggtcaggggaaatatggagcgattcatgggttttttgaaggggagtgatgaaaatgttctaacgttgactgtggtaatggttggacagctctgagaacgcgaatacactaaaagacatggaagtgccgggcgcagtggctcatgcctgtaatcccagcgctttgggaggccaaggcaggcggatcgcgaggtcaggagatcgagaccatcctggctaagacagtgaaaccccgtgtctactaaaaatacaaaaaattagctggacatggtgcgggcgcctgtagtcccagatactcaggaggctgaggcaggagaatggtgtgaacccgggaggcggagcttgcagtgagccaagatcgcaccattgcactccagcctgggcgacagagcgagactccatctcaaaaacaaaaaaaagatatggaagtgtacacttgaagtggataagctttatggtatgcaaattggtatggtatggtaaattatatctcaatgaagttgttttttaaaaaatcaccccacctaccctatcccaggcttccccaggaggtaactaaaggtaatgagcttctttggctgcttccagaactttcccaagcacatcaaatgcatcagaacctaaccacttgactgagggatgagcattttcactgttgcaagtaaccctcttgcaccaacactgacactaatgtgtattttgcagaacaaatttgtggattggcctcaccagggtgaagggtacgtgcatttgaaatggctcaacagtaccaacaggtgcgttttcttgcacagggctgcataacattttttttttttttttgagacagagtctcgctctatcacccaggctggagggcagtggcacaatctcagttcactgcaagctccacctaccaggttcacatcattctcctgcctcagcctcccaagtagctgggactacaggtgcccgccaccacaccaggctaattttttttttttttttgagatggagtcttgctctgtcgcccaggctggagtgcagtggcacgatctcagctcactgcaagctccacctcccaggttcacaccattctcctgcctcagcctccccagtagctgagactacaggcgcccgccaccacgtccggctaatttttttgtatttttagtagagacggggtttcaccgcgttagccaggatggtctcgatctcctgacctcttgatccacccgcctcggcctctcaaagtgctgggattacaggcgtgagccaccgtgcccggcctgcataacatttttttttttcctgaaattcccagaaaggaaaatggtgtcttgttctatgttgcatttctttgattgagagggagagctgcatcacttaattatttgcagagaattgcttttcttgttttctttacaggtggtctgttcttggatggtctggctgtgttctttctgaggaatacataacctctgctacacattttgcaaggctttatccccgttgtccatgttttgattttatgtataatcaaaaggtttgtgagttctcccgcacttcccaggagtgcctctgggatggaaatgagactgcaggagcagggcttgaggctggaggggtgagatgggacagatgggggtgggggaacccagggcagtggccggtggtggtaatggaggcctcctcacagggaccctcacagcgaccatgcgaatggagcaggactgtgactcaggtctcgctcttctgacctaatcgtgctgctgccccaatgggcagaaccttggggctccagactggacatctctgggctcaaaggatcccactgttcccccggttaccctctcagggttggcctcctgccagtaaccctggcactcattgttcattcttctgactatcgtcagtcataatgagagctcgaactggtgaaagtgcagggagctcaccatgaccccagcccacagaggtcctgggtgcgtccctgccctcgaagcagcactctggatcccagcgccaccctcatgtccatgtttgcacctcattggctgtgacagaaatgagacatcattgtcacacgctggcctgagggtcagtgggccttgctttggacctcagtttccccaccagtaacagggttcagagcagatggtccctgagtgagtcccagctctaagttctcccagggtctcctggacaatgaagcaccagggccaacctccatttgctacaggggacatcctcaggctcttctctgctaagaccccacacctccaagtctcctcattttacctttaaatagctgtttcatgacctgcttttttgacggtaagtagatttttggaaactgaaacccctgacccttcctcccagcctgggcctgcccttggcaggataggaggccttatcggtcctgccacttggtctgggcctcaaagggccaccgccatctgcaggagggccgggtggggttcacagacgctatctgggacttgcctggacacctccaccttctcagctgagtgttgctgccccaccagggagaaccactcacacacagtagtaatagaaataatttaaaattcatgctgcaagttcctgagcgccctcccaacactgaggtgggggctagtctaatccccatcctagaggtgaaaacagtgaaactaggactcacaaggcaaattagcctgttcagggtcaccgagggtccactctcatgggagagtttgcagatgcccaatccggcattctgctgagtgtccagtggcttgtaagtggccagacaccctttgagctcagcctcagctgctcaggcacagaacgtgcctggagcttggaattcaggccagaaaccaccagtggacaccagcattccacactcactgcacaggctggggctcaaaccaaggcccagggacaggaagggacaagccccagccccagccggactcccagcccacacaaaccatcagggcttgtttcctgctccatggaagcctcagacatgtttcataacctcctggagcctccgtttccttatctttccaatgtaatgatgcccatgtgcagtggctcacgcctgtaatcccaagcactttaggaggccgaggtgggtggatcactggagctcaggagtttgaggccagcctgggcaacatggcaaaacgccatctctactaaaaacacaaatattacccaggcatagtggcacatgcctatagtcccagctactcaggaggctgaggtgggaggatcacctgagcttgggaagttgagcctgcagtgagccaagattgtcacactgcactctagcctggaggacagagtaagaagaccctgtaacaaaacaaaacataacaaaacaaacaaacaaaaaacccaactaatgacaataaaataaaccctccctcacagggtggttgtgaggataaagcacccagaatgaagagtgttgctgccatgtgcagaacttagaaagtgctcaacagatgccagccaaacagacatggactcccctcaacacagtcaacccaaggttgactgtcaccaaacgcaaaagaccacactgtaaagcttttagaaatgtggtctagtggccgggcactgtggctcatgcctgtaatctcagcactttggaaggctgaggcgggcggatcacagggtcaggagttcgagaccagcctgaccacctgaccaacgtggtaaaaccccgtctctactaaagattcaaaaaattagccgggtgtagtgctacgtgcctgtaatcccagctgctcgggaggctgaggcaggagaatcgcttgaacccaggaggcggaggtacagtgagctgagatcgcgccattgcactccagcctgggagacagagagagactccgtctcaaaaaaaaaaaaaaaaaaaaagttagccgggtggtagtggcatgtacctgtaatcccagctacttgggaggctgaggtaggagaatcgcttgagcctgggaggtagagggttgcggtgagccaagatggcgccactgcactccaatctgggcgagacactgagaccctgtctcaaaaaaaaaaaaaaaatgtggtctaggagactctcttcactttgagataaaatttgcatcacgtaaagataaccattttaacgagagcaagtcaacggcattcagcacattcagagtgttgtgcaacaaccacttctccctggttccaggacattttcatcgcctcagatggaaacgccctcctcacggaggcatctctcccggcctttgtcctccccggccctgacaaccactaatctactttctgctgggatttgcccattctggatgtttcctaaaaatggcttatctaagccccacagtttcatgcagcacgtagcctctggtgtgtgacgtccttcacttggtgtaatggttcgaggcttgtccatgtcgtagcctgggtcagaacttcattttcatggctgaataatatctcacggtgtggaaatatcacagtttgcttatctgttcatccagtgatggacatttgggttgtttctaccttttggctattgggaatggaagggataacattttttaattggatttttaaagtcactagtttgactgcattaaaattacaaacttttgtttaacgagaatatcactaagatacagagttggggagatctaacacataaaagtgacaaaggaattatatccagaatatttttgaaatttctacaaatcagtgactggcaacacagtgggaaagtggccaagactaaaatactttaataaagaggaaaccgaaatggccagtaaatatgggctcaacctcactaattatcaggaaaatgtaaattaagaccacaagagaaaccactacacactcaccaaaaatcacacacccaataaaaaggtaatttttttttttttttgagatgaagtctcactctattgcccaggctggagtacaatggcgcgatcttggctcactgcaacctccgcctcctgggttcaagcgattctcctgcctcagcctcctgagtacctgggattacaggcgcacaccaccacacccagctaattttgcatttttaagtagagacggggtttcaccatgtgggcaaggctagtctcgaactcctgacctcgtgatctgcccgccttggcctcccaaagtgctgagattacaggcatcagccactgtgcccggcctaaaaaaggctaaaatttaagaagaccaggagtttgactgctatggttggaatgtttgtctcctctaaaactcttgttgaaacttaatccccagtgtggcagcgttgagaggtggggcctttggggtaaggaggttggatcatgagggtcctcccccaaggaatggattaatgagttgtcatgggagtgtggctggtggctttataagaagagagacctggccgggcacggtggctgacacctgtaatcccagcactttgtgaggccgagatgggcggatcacaaggtcaggggatcgagaccatcctggctaacacagtgaaaccctgtctctactaaaaaaaaaatgcaaaaaaattagccgggcgtggtggcgggcacctgtagtcccagctactaggaaggctgaggcaggagaatggcgtgaacctgggaggcggagcttgcagtgagccgagatcgcgccactgccctccagcctgggcgacagagcaagactctgtctcaaaaaaaaaaagaagagagatctgaggtggcacacaagcatgctcagcccacacgacctgcgattaatactctgtgccactttgggactctgcacgagtccccactgggctcgaaacttctcagcctccgtaactataggaaataaattccttttaaaataaattccacagtctcaggtattctattataagcaacagaaaatggagtactacaccgatcatatcaaatgtttagaaggatttggagcaaggagaatgctcgcacaccactagggaaaacataagttggttaaccactgtgaaaaagtttggcattctttactaaagttgaaaatctatatgccctatgacccagcaactttactcctaggtatgtatgtacaaaatagaatttcaggcatgtgggtaccaggtgacatgtaaaggaatgtttattgcagcattattcataatagccaagaactaaacaacacaaagttccagccccagtacaatgaataaactgtggtatattcctacaaggaaatattaatagatacagcaatgaaaatgaacacatataacatggctggtaaatctgacatgagagagtgaaagaagatggacattcagtgtgcagacagttggattaaaaatatttttttaaaggccaggcttggtggctcacatctataatcctagcacttacagaggccaaggcgggcagatcacctgaggtcaggagttcaggaccagcctggctaacacagtgaaaccccatctctactagaaaatacaaaaattagccaggtgtggtggtgcatgcctgtagtcccaactactcgggaggctgaggcaggagaatcacttgaacctaggaggcggaggttgcagtgagccaagatcgcatcactgtactccatcctgggtgacagagcaagactgcgtctcgaaaataaatagataaataaataaataaccaacaggccgggagcagtggctcatgcctgtaatcccagcactttgggaggctgaggtgggcagatcacgaggtcaggagatcaagaccatcctggctaacacagtgaaaccctgtctctactgaaaatacaaaaaaattagccgggcatggtggcgggcgcctgtagtcccagctactcaggaggctgaggcaggagaatggcatgaacccgggaggtggagcttgcagtgagccgagatcatgccactgcactccagcctgagcgacagagcgagactccatctcaaaaaaataataattaaaaataaataaattaaataaataaataacagattgcataaagtggctcatgcctgtaatccaagcactttgggaggccaaggcagaaggatcacttgagcccaggagttcaggacaagcctgagcaacatggtgaaaccccacctctacaaaaaaaaaaaaaaaattagctgggcatggtggcatgtgcctgtgatcccagctacttgggaggctgaggcaggaggatcacttaagcctgggaggtcgaggctgcaatgagctatgatcgtaccactgcactccagcctgggcaatagagcaagaccctgtctcaaaacaaataaacaaaagccagacagacacaaatgagagcattctgtatcgtttcatttctatgaaggtgaaaagcaggcaaaaacaaccaaagtgcttgcagatgcatatctgagtagttaaaaacttactgaaaagcaggcctggctcacgcctttaatcccagcactttgggaagcgggcggatcacgaggtcaggagatcgagaccatcctggctaacacggtgaaaccccgtctctactaaaaatataaaaaattagccaggtatggtggctagtgcctgtggtcccagctactcgagaggctgaggcaggagaatggcatgaatccgggaggtggagcttgcagtgagctaagatcgtgcaactgcactccagcctgggcagcagagcgagactccctctcaaaaaaaaaaaaacttactgaaaagcaagaagtcaggtggaggttacctttggggaggattggggtgctgtccgctttctaataattcgttaaactatagtctacatcttgtgctatatttcacaatggaaaaacagaaaagagctcctgcccataacgctgctttgcaggtttggaaatttcagattcaattcctctccttgcgggggccaaggatgggaagagcaggtggttccagtagggaaagaggaggccctggggcctcaaaatggctaaggaccattcctcagcgtgggtggcacctaccctggaaacaggactctacttcctcctctgttagggggcagagcagccctgcagtgccttctgggcacaggtcctcactctgcagctggaggaattctcccaggcactgagagcccttcacggcccaaatgccccgtgcgctcggcctctggacttgccttccctgctctgtatatctccctccgcctgaccctcagcctcctccatcactcactgtcttctctgccagtctattcatctgtctctgtccctctctctgccaccttctctcctattgagaagccgaaacctcaggcacagacccacatcccctcctcatgggcccatgtgcccaaggtgcccctaggtgccaggctgagatgaaccaggagtgtccttctgaacccagcaacagcgaagggtgaccagggagggccagttcatctcggtctgaaagaagccccagatgagcaaaggatacactggcctcctgcggtcagcagcacttcccaggacagtgagcaagacaggggtaaggccagagtgggtgggcacacccatgggagagaggagccgctgtgaaatgtgcacgaggaacagaccagcaaggaggatccacgcagtgctagaagggagttcctggaagcctggtggagagcccctcccatctgctaagcccggagggcatcaaaggctgctgctgccctcaacccctgacaatctcatcatctcatatctcaggcatggaagaatgagggccattacacgagtaaaacatcaagtacactccagcctggatgacagggccaggctccatctcaaaaaaaaatgcctgtggtcaaagctctcctgacaggggaaaacaaaacaaaacaaacttctccttaaagaaaacatttgcctttgactgcatcataattccagcaggattttgtgcagataactctttggctaactctaaaattaatacagaaaggtaaagaaattagaatagccaaagaaattttgaaaaggaagaataaagcgagaggaatcacattcctcaatttttaacagctctattgagataaaattcacataccatacggttcacccatttaaagtgtataattcaggccgggcgcggtggctcacgcctgtaatcccagcactttgggaggctgaagcgggcagatcacctgaggtcgggaattcgagaccagtctgaccaacatggagaaaccccgtctctactaaaaatacaaaattagccaggcgtggtggctcatgcctgtactcccagctactcggaagactgaggcaagagaattgcttgaacccgggagacggaggttgccatgagccgagatcgcgccaccacacccagctgccattttttaattgattacttgtctatttattactgagttgtaagatattttgggccaagcacggtggctaacgcctgtaatcccagcactttaggaggctatggtgggcaaatcacttgaggtcaggagttcgagaccaggctggccaacatggcaaaacaccatctctactaaaaatacaaaaaaattagccaggtgtggccaggcgtggtgactcacgcctgtaatcccagcactttgggaggccaaggcgggtggatcacctgaggtcgggggctcaagaccagcctgaccaacatggagaaaccccgactccgctaaaaatacaaaattagccgggtgtggtggtgcatgcctgtaatcccagctactcacgaagctgaggcaggagaatggcttgagcccaggaggcagaggttgtggtgagctgagatcatgccattgtactccagcctgggcgacaagagcgaaattctgtcacaaaaaaaaaaaaaccattagccagccatggtgatgcacacccgtggtcccagctactcaggaggctgaggtatgagaattgcttgaacccaggaggcagaggttgcagcgagccaggattacgccgctgcactccagtctgggtgacagagcaagactctgtctaaaaaaaaaacaaaaacaaaaaagatattttgtatgtgtttggataacttccctatcagatatatgatttgcaaatatgtttctctcattctgtgagacatcattcaattttaagacatcacagagctatgttaatcaaggcactgtggctgtggtaaaggatagacacacagaacagaacagagagcccagaaatggacccgcaaacctatgccccattcattttttacaaataagtgcgagaagccaactgaatagaaagcgtatagctttttcaaaaaacagtgctggaacaattggacatctgtaggcaaaaaaacaaacaagcaaacagaagaatctggacctgcccttcacacctcagacaaaagtcatctcaaaatggattgtagatctcaatataaacataaactatacaactttagaagaaaatataggtgaaactctttgtgttctgtggttaggcagacagttcctaggcatggcactaagtaagattcatttaaaattttttgacaaattggactttattaaaacttttgctctacaaaagacaatattaagagaatgaactaacaagctacaaactaagagaaaacatttgcaaattgcatatctgacaagggattgcttccagacgatacacagaattctaaaaattcatccttaagagaataaaccacccaatttttaaatgggcaaaacaggccaggcgtggtggtgcacgcctgtaatcctagcactttgggaggccgaggcaggcggatcacaaggtcaggagattgagaccatcctagctaacacggtgaaaccctgtctctactaaaaatacaaaaaattagccaggcatggtggcaggtgcctgtagtcccagctactcgggaggctgaggcaggagaatggcgtgaacctgggaggcggagcttgcagtgagtggagatcgcaccactgcgctccagcctgggcaacagagcgagactccgtctcaaaaaaaagacaaaatacttgaaaagatattggctaggcgcgctggctcatgcctgtaatcccagcactttgggaggccaaggcgggtggatcacaaggtcaggagttcaagcagcctggccaagatggtgaaaccccgtctctactaaaaaaaaaaaaaaaaaaaaaaaaaaaattggccgggcacagtggctcatgcctgtaatcccagcactttgggaggctgaggcaggtggatcaggagtcaggagatcgagaccatcctggccaacatggtgaaaccccatctctatgaaaatacaaaaattagccagagatgatgccgggtgcctgtaatcccagctactcatgaggctgaggcagaagaatcacttgaaccagggagtcagaggttgcagtgagctgagatcgcaccactgcactccaccctgggcgacaaatcgagattccatctcaaaaaaagaaaaaaaaattaaaaggaatatttgcctcattatgttacaataactaatatggaaagcaatattgcaatgcctattagcacatgacattaggtgaattctcctttgtccccggacctgctgcctcctcctgcttgtcaggggacagatccagtacatctcccctcagcgctgggtggacctaacccttgctttcttggaggaaacccaggaatccagagacaaagtggaagggtactggcatgtggttgggcagggctgcctgaggtcggtgtcagccgaccgtggggcttggtcccaggaggctgcttactgggccctgctcctctggtttcccccaagtcgtgattctgaaatgaataaggacggtgcagaactggactacaaatgcaggagtgacttcctgggagggtggggcccctatctctcctagactctgtggtcagactctggccaacaccccctgtaaggccacaggagaggaacaggagtgatagcccccaaaccccagtcccaccaggccctgagggcccctttgtcactggatctgataagaaacaccacccctgcagccccctcccctcacctgaccaatggccacagcctggctgggcccagctccctgtatataaggggaccctgggggctgagcactaccaaggccagtcctgagcaggcccaactccagtgcagctgcccaccctgccgccatgtctctgaccaagactgagaggaccatcattgtgtccatgtgggccaagatctccacgcaggccgacaccatcggcaccgagactctggagaggtgagtgtcagacgggactgccagagggactgggtgggaggccaggtatgtgagtggggacagtggggagggggcggtggggaggggacagtggggaggggaccatggagaggagacagtggggagggcactgtggggagaggacagtgaggaggggaccttggggaggggacagtgaggagggaaccgtggagaggggacagtgaggaagggacagtgaggacagatagcgttccctctcagtgaggagagcagggtaaggagggaacgattaggagttgcacaaccatctgggctcgctgagacctgggcaggcacaggcccaggttctgacaagcagagggtgaaaggtttcgttctaggcctgaagggccttacagggcagccagggcactacagcctctaaagtcccagcatctgggatcagggcactgtcccagcttcaaattcccagcatctgatcccctgggaggggccagggagcttttccttccctggaacgctgctgggaggtcatgagcctgcagaaggggtggcgggcaacccagtctggggctgggagggaggtcctgtggccagaggagacggtggaggggctgggggcaccaggcgtgctggaggcggagggcgggagatttggggaccaggctgcacagaacccgtcggaagcagggcgatcagccgggagctgcagaggcctggggggcctctagcccagggcagcctgggaggggcagctgcctgggcacccgggccccgcgaggaggggctggggcctgctgcggggtcgcagatgtgtcccggtgctcggagagggccgcagggcgcgtgggccgtggcgggaggccgcgctgctgggagctcacggcccccgccccccgtcccaggctcttcctcagccacccgcagaccaagacctacttcccgcacttcgacctgcacccggggtccgcgcagttgcgcgcgcacggctccaaggtggtggccgccgtgggcgacgcggtgaagagcatcgacgacatcggcggcgccctgtccaagctgagcgagctgcacgcctacatcctgcgcgtggacccggtcaacttcaaggtgcgcggggcgcggtgcgggcggggcgggacggggcggggcgcggtgcgggcggggcggggcggggcggggcggggaggggcggggaggggcggggtcgcggggcggatgcgggggtcgccgggcggggcccgggctaggccccgccccctcactgagccgcccccgcccccagctcctgtcccactgcctgctggtcaccctggccgcgcgcttccccgccgacttcacggccgaggcccacgccgcctgggacaagttcctatcggtcgtatcctctgtcctgaccgagaagtaccgctgagcgccgcctccgggacccccaggacaggctgcggcccctcccccgtcctggaggttccccagccccacttaccgcgtaatgcgccaataaaccaatgaacgaagcagcgtccacctggtctctgttgtccgtgggcggcgggcgcttggggaggcggagcgggaggagggcgccccggctgtctcggggccactgctgggccgcagggatccttgcaccgaccccagggtctctaagaggcagagggatgtgcagctcccggggcgggagcgggggtcactcgggacccaggcgtggtggagaaggggtgcagttaggcctttgcggaggggggagcagtgctggcgcccacccgccgcggctctccctgggacctccgtggtcttccttctttatttctcccgaatgtgtactatttcctgatttcagaacgatcaggacgaagaggggagggatgggcgtctgcgctcactcattccttcttccattcctcaatgaaacatttactgggcataagacagcctaggcatgtttctaggctatggataccgcagctgaaataaagaaagccctctgccccgtggggctgacaatctagtgggggatacagacgtgatgaagacagtcagatcacagttcacagaaatgagacaggaaaagaggctgagcctcactcataagagaaacgcaagttaaactacacaaaaataaaaaacctcactgagatccatgtctcacctccctgataggcaaaaatccaagagtttgatcagactgcaggcgcccctcctccactgggcacccctcatccagggcagagggaaccagcccggggcgcaagtccaccggggcatctcatttgctaaagacctgaaaacccaggtgtccatcatcaggactaactggaaaaaccaagggtatccgcaccatggagagctcgactgaaaaaaaaaaatgaggataattggataatttctttttttttttttttttttttcagacggagtctcgctctgtcgcccaggctggagtgcagtggtgcgatcccggctcactgcaagctccgcctcctggtttcaagcgattctcctgcctcagcctcccgagtagctgggtctacaggcgcccgccaccacggctggctaattttttgtatttttagtagagacggggtttcaccgtgttagccaggatggtctcgatctcctgacctcgtgatccacccgcctcggcctcccaaagtgctgggattacaggtgtgagccaccgcgcccgacctaaaatgaggataatttctaataatgaaaataaagaggttagaatggtgtgtatacaatggtggaacagaggagaaacacgaatatgtgtgtgcacatatatgtgagcttatgcataactatgtatgaggctgcgtgtggacatgtgtgtttgtgcacaaccatgtatgtgcccgcatgtgcttatttctgcaaaaataaaccatggcaggacaaaccggaaatgaatacaaataataaggtgggtggggatggaggggaaggtggaaggaagctcctgcaagtctgactctctacatagttttgacctttgatttgtgtaaatattttacattatcaaaaataaattcaggctgggcatggtggctcatacctgtagtcctagcactttgggagtccaaggggagaggattgcttgaggccaggagttgaaggccaccctggccaacatagagagaccctgtctttaaaaaaaattacaaaattaaggccgggcgcggtggctcacgcctgtaatcccagcactgtgggaggccgaggtgggcggatcacgaggtcaggagattgagaccgtcctggctaacacggtgaaaccccgtctctactaaaaagtagaagaaattagccgggtgtggtggcgggtgcctgtagtcccagctacttgggaggctgaggcaggagaatggtgtgaacccgggaggcggagcttgcagtgagccaggttcaagccactgcccttcagcctaggtgatagagtgagactccttctcaaaaaaaaaaaaaaaattacaaaattaataagattaaaataaaaagaggggccttgccagtggctcaagcctctaatcctaccacttgggaggccaaggctggaggatcccttgatgccaagagtcggaggccagcctaggtaacacagcaggacctcgtctcaaaaagattaaaaaattaactgggcatggtagcctccaaattgggggttagcctgggaggtttgcccaggaaggaattcaagggcaagctggtggtgttacacagcaactctgattgatatcgaagccacagcagacagcaggagcagaacactgctccttacagagcaggggtaccccataggctgtgtgcacaggagagcaactcagaggcactgctgcactcatctttatacccacttttcattatatgcaaattaagggaaagttatgcacaaatttctaggatgagtgtggtaacttctgggtggtccagtcactgccatggaaagggatggtaaactcccatggcacactggtgggtgtgtcttatggaaagctgcttctgccctacttgttttagctggtcctcagtttggtccggtgtccgagcccaacatccggagtacatgcagagtcccacctcctacgtcacacctgcagttccagctactcaggaggctgaggctggaggattgctggagcccagatgttgaaggctacagtgagctatgattgtgccaccgcacttcagcctgagcaacacagcaatactctctctctaaaaaagcaaagcacacaaacaaaaagagtgactgggtgcagtggctcacacttggaatcttagcactttgggaggccaaggtgggatggtcacttgagcctgggagttcaagaccagcctaggcaacatagcaagactttatctctactaaaatatatatatattttttaattagctggacatggtggtgcacctgcagtcccagctacttgggaggctgagttgggggtggaggggagtatcacttgagcccagaagttccaggctgtagtaagctatgattgcaccactgcactccagcctgggcaacagagagagaccttatctatatttaaaaaaaaaaaaaaaaagagagagaaaattgaaaactcctaattgaaaacccccaaattgaaaactaacttaaataaatgagccaatgtaagaatgtggtgatataataatcagaaaaaaggattgttccaggtgacctctgaacacagaacctcggctatgaccgaaagaactccaaagacactctaacactccgtggtttattgttcctcataacatatataaaataatttcataagcttttattttgaaacatattcagattatgaagaaataaaaacaccctgcaagaataagacaaagatggagaaggaaggatgactgctggtgggtttggggcttttggagggtgatggaaaccttctaaaattgattatggtgatggtcgcacaattatgtgaacacattaaaaattattgaaatgggccgggggtggtggctcacccctgtaatcccagcactttgggaggccaacgcgggcagattacctgagctcaggagttccagactaacctggccaacatggtgaaacccccgtccctactaaaaatgcaaaaattagccacgcatggtggcacatgcctgtaatcccagctactggggaggctgaggcaggagaattgcttgaacccaggagacagaggttgcagtgagccgagattgtgccactgaactccagcttggccgacagagtgagactctgtctcaaaaaaaaaaaaaattattgaaatgtacacattaagtgggtgaattttatctcaataaaactgttaaataaaataacaagaatatgaaaaactcttgaatactactcatccagactctccagctgttaacattctaccacatcggcttgctctctcttgcccccacttgctctttctctcggagcccttggagaggggtatgcaaatatccgtactctaaatatcctccatatactgtgtatttcctaaaatcaacaaggacattaggctgcacagccagagaacaaccatcaaaatcaggttaatattgatccaaatccatctatcaacagaagcaacatcaagttcaagacccttttgaaagcaatgataccagccatttactccatccctaaaggactgagggtgctgcgaatttaaccgtatcaatgcagtctttttgatgttatttactgaaggaaatggatgttctttaaaatatgtatttatttatttttcttttttgagacggaatcttgttctgtcgcccaggctggagggcagtgggacaatcttggttcactgcaacctctgcctcctgggttcaagaggttctcctgcctcagcctcccgagtagctgggattacaggcgcgaaccaccacgcccggttaattttggtatttttagtagaggcggggttttaccatgttggccaggctggtctcaaactcctgacatggtagcctgtaatcccagctactcgggaggctgaggcaggagaatcgcttgaacccaggaggtggggttgcagtgagccaagatcgtgccattgcactccagcctgggagacagagcgagactccatcaaaaaaaaaaaaaaaaaaaattcctgaagctcctcttgagcttacattctagtggactgtaaacagaaacatttttttttcctgtggataaagaaaagcagggcaagtaggggcttagacagaggaggggaggattcagattttaaatgggttggccactgtaggtctattaacgtggtgacatttgagggagtggcaatactagggaaggggcttcaggggagtggccaggagctagggatagagggagggaggacaggaggccttgtctgtcttttcctccatatgtaagtttcaggagtgagtggggggtgtcgagggtgctgtgctctccggcctgagcctcaggaaggaagggcagtagtcagggatgccagggaaggacagtggagtaggctttgtggggaacttcacggttccattgttgagatgatttgctggagacacacagatgaggacatcaaatacatccctggatcaggccctggggcctgagtccggaagagaggtctgtatggacacacccatcaatgggagcaccaggacacagatggaggctaatgtcatgttgtagacaggatgggtgctgagctgccacacccacattattagaaaataacagcacaggcttggggtggaggcgggacacaagactagccagaaggagaaagaaaggtgaaaagctgttggtgcaaggaagctcttggtatttccaatggcttgggcacaggctgtgagggtgcctgggacggcttgtggggcacaggctgcaagaggtgcccaggacggcttgtggggcacaggttgtgagaggtgccctggacggcttgtggggcacaggctgtgagaggtgcccaggacggcttgtggggcacaggctgtgagggtgcccgggacggcttgtggggcacaggttgtgagaggtgcccgggacggcttgtggggcacaggtttcagaggtgcccgggacggcttgtggggcacaggttgtgagaggtgcccgggacggcttgtgggacacaggttgtgagaggtgcctgggacggcttgtggggcacaggctgtgagggtgcctgggacggcttgtggggcacaggttgtgagaggtgcccgggtcggcttgtggggcacaggttgtgagaggtgcccgggacggcttgtggggcacaggttgtgagacgtgcccgggacggcttgtggggcacaggctgtgagggtgcccgggtcggcttgtggggcacaggctgcaagaggtgcccgggacggcttgtggggcacaggctgtgagggtgcccgggacggcttgtggggcacaggctgtgagggtgcccgggacagctcgtggggcacaggttgtgagaggtgcccgggacggcttgtggggcacaggctgtgagggtgcctgggacggcttgtggggcacaggttgtgagaggtgcccgggacggcttgtggggcacaggttgtgaggatgcccgggatggcttgtggggcacaggttgtgagaggtgcctgggacggcttgtggggcacaggctgtgagggtgcccgggacggcttgtggggcacaggctgtgagaggtgcctgggacggcttgtggggcacaggctgtgaggatgcccgggacggcttgtggggcacaggttgtgaggggtgcccaggacggcttgtggggcacaggctgcaagaggtgcccaggacggcttgtggggcacaggttgtgagaggtgcccgggacggcttgtggggcacaggctgtgagggagcccggcacggcttgcagctacagggagaaaagacttggtgctgtgggcctgccttggggctggtggtacagcccttatctgctgccctcaggatctcccggcccctctcgtccaggcccctgcaaccccatgccccagcctctgaggaccaaaggcgcccctgcttgggaagagggggctcaggggagtcgcctgacccggttccaagccaggctgatttaccgttgctaacatcctatcgcacgcatccctctgcctcatgcacccaaccccaaggcctggtacactgcaggccccaaggtcctgtgcgtcctttcaataccctcctcacctgcctcacctgccccccctaccctgactctggctggagaccccctccagggagttttcaaaacaaagggtgtcagtctcctgtgggattccctcacctctgcagcctgcggtctgaaagctgccccatggtgtgtagtgctaaacttccaacttactccaggccagcggtgacagcccgagggcaggaagggcacccacactgagcctcaaacagctaattttgcaactgtaagtccatataattgtcttgaaaagtaatttgtttcaaaaagctaaaaaacgaatactcttgagtctccttctagtaattccccttctagaggtctatcaccaggaaaagatccaaagcactgatattcttcatggagttgtttataatagaaaaaaactagagcttgttcacaaaggggagctctgcaggctgaagatgttgcacctgtcagcggggatgggggcacgcttgctgacgcagcaacggaaaagcatcagtgtgtgaagatgcattttctctctttctattattattatttttatttttattttttctgaggcagaacctcgctctgtcacccaggctggagtgcagtgatgcgacctcatcacaaccacgagccaccatgtgcggccccatgagcaagccaccacgcccagcctttttttcccttgttttaaaaaatcctctatttaaaaaagatgtgcatgggccgggcacggtggttcacgctcataatcccagctctttcagaggccgaggcaggcagatcacctgaggtcaagagttcgacaccagcctggccaacatggtgaaattccatctgtactaaaaatacaaaaattagccaggccgtggtggtgtgtgcctgtaatcccagctactcaggagactgaagcaggagaatcacttgaacccaggaggcagaggttgcagtgggtcaaaatcatgccaccacactccagtctgggagacagagcaagactccatctcagaaacaaactaacaaacaaaatttttatatctacctataattcgtataaatttaaaatacatgcataaaatcataccctttgcaagcacacgtactaactaaaaggaatatattcagcacatagaaatggttgtctaacggaggaggggggagttaataaacagagaggataaaaagaaataaatcagtagagctggaggagggtctcctccaggctgcgatgagaacatagtgagcagaattgcaggcctgcatgacctcaccttctgtgaggagtccggcctcccaagacgctttcctgcctaggtgcccggctcagagtgtcccctacaaggctactggaggagaaccccagaccgagcctcattcaggtgagggggctgcacaccggaggtgggagaggtctgtcccttcccaccctgtgacactgggtcccactttctctctagggggtctcggtttcctcatttgcaaactggagctcataaggtgggccagagaagtttcagtgaagtgaggaatggatcgtccctctgccagggcccatgtgctctaggtcaccctgtcatcacagggacagggaggtcaaggacagtcactcctgaggccagtccgggctgggctgaccacgtggactctcatgcccagattggggccccaatctccctgaagctggggctccagctgtgactcaggggtgggcagaaggggagacagaagcgataggttcctcagcccccagtcccacctgagggcccctttgtcactggatctgataagaaacaccacccctgcagccccctcccctcacctgaccaatggccacagcctggctgggcccagctccctgtatataaggggaccctgggggctgagcactaccaaggccagtcctgagcaggcccaactccagtgcagccgcccaccctgccgccatgtctctgaccaagacttaggggaccatcattgtgtccatgtgggccaagatctccacgcaggccgacaccatcggcaccgagactctggagaggtgagtgtcagatgggactgccagagggactgggtgggaggccaggtatgtgagtggggacagtggggagcgggcagtggggaggggaccgtggggaggggacagtgagtaggagacagtggggagaggacagtggagaggggacagtgaggaggggaccatgggaaggggaccgtggagtggggacagtgaggaggggaccatagggaggggacagtggggaggggacagtgaggaggggaccgtggggaggggacagtgaggaggggaccgtggggaggagacagtgaggaggggaccgtagggaggggacagtgaggaggggaccgtggggaggggacagtgaggaggggaccgtggggaggggacagtgaggaggggaccgtgggaaggagacagtgaggaggggaccttggggaggggacagtgaggaggggaccatggggaggggacagtgaggaggggacaatggagaggggacagtgaggaggggactgtggggagaggacagtgaggaggggaccatggggagggcacagtggggaggggagagtgaggaagggacagtgaggaggggactgtggggaggggacagtggagacagatagccttccctctcagtgaggagggcagggtaaggagggaacgattaggagttgcacaaccatctgggctcgctgagacctgggcaggcacaggcccaggttctgacaagcagagggtgaaaggtttcgttctaggcctgaagggccttacagggcagccagggcactacagcctctaaagtcccagcatctgggatcagggcactgtcccagcttcaaattcccagcatctgatcccctgggaggggccagggagcttttccttccctggaacgctgctgggaggtcatgagcctgcagaaggggtggcgggcaacccagtctggggctgggagggaggtcctgtggccagaggagacggtggaggggctgggggcaccaggcgtgctggaggcggagggcgggagatttggggaccaggctgcacagaacccgtcggaagcagggcgatcagccgggagctgcagaggcctggggggcctctagcccagggcagcctgggaggggcagctgcctgggcacccgggccccgcgaggaggggctggggcctgctgcggggtcgcagatgtgtcccggtgctcggagagggccgcagggcgcgtgggccgtggcgggaggccgcgctgctgggagctcacggcccccgccccccgtcccaggctcttcctcagccacccgcagaccaagacctacttcccgcacttcgacctgcacccggggtccgcgcagttgcgcgcgcacggctccaaggtggtggccgccgtgggcgacgcggtgaagagcatcgacgacatcggcggcgccctgtccaagctgagcgagctgcacgcctacatcctgcgcgtggacccggtcaacttcaaggtgcgcggggcgcggtgcgggcggggcggggcggggccgcggggcgggcggggccgcggggcggggtcgcggggcggggcggggtggggtcgcggggcggggcggggtcgcggggcggggcggggcggggcggggcgggcggggcggccggggcccggcggggcggggcggggcggggaggggctgggcggggcggggcgcggggcggggcgggccgggccggggcggggtcgcggggcggggtcgcggggcggggcgcggggcggggcggggcggggtggggtcgcggggcggggcccgggctaggccccgcccccgcactgagccgcccccgcccccagctcctgtcccactgcctgctggtcaccctggccgcgcgcttccccgccgacttcacggccgaggcccacgccgcctgggccaagttcctatcggtcgtatcctctgtcctgaccgagaagtaccgctgagcgccgcctccgggacccccaggacaggctgcggcccctcccctgcccttcaccctcccacagttcctgccctgactccaataaatggatgaggacggagcgatctgggctctgtgttctcagtattggagggaaggaggggagaagctgagtgatgggtccgggggcttcgcaggaactcggtcgtccccactgtcgtcgcggcctggggttcacttggggggcgccttggggaggttctagcccctgagcaccggagctgcggcccgggtggagcggagcagtcccgggccggcccgcggcgtctcctggggtccttgagtcggacgggcgtttgtgcgtctcccggcttcccatatcgcacaaagattgtcacttcactaagcgtattggaagcgtgtcggggctcagggaacttttccacaaagcctgacgtccgaatcccgggactctggcagctacgggggtccctgaggccggtccctccccgactcctaagagagtagggggtttcctgcccggtgttctctctccggttcctcccatgtgctccctcctggcagagcagtaactttacccgaggggagtaaacagatgcccctaaagtctgcagtaaaggtgcccacgcgcaacggcgtgggtcaatgccagaaaccctgggatcccggaggtcgaggcctccacacagacgggaacccgggctggttacgttccccggcgcaggccgagggtccccgcgttcccgccgcgctcgggccgataaggacgggcggggtgcccggaggctctataaggaggccagggcggcgggcgcggcccccagagcacgtcaggcggcgccatgctcagcgcccaggagcgcgcccaaatcgcgcaggtctgggacctgattgcgggccacgaggcgcaattcggggcggagctgctgctcaggtcggtagaggcggggtctccgggagctcagggaggtggagatgagggttttgggcgcgtgggccgccaacgccatccaaggtccttcgggtgcggatccccgggctctgggcggtgtgggcgctagtgaagccccacgcagccgccctcctccccggtcactgacctggtcctgcaggctcttcacggtgtaccccagcaccaaggtctacttcccgcacctgagcgcctgccaggacgcgacgcagctgctgagccacgggcagcgcatgctggcggctgtgggcgcggcggtgcagcacgtggacaacctgcgcgccgcgctgagcccgctggcggacctgcacgcgctcgtgctgcgcgtggacccagccaactttccggtgaggcctttccggccggggcaatggtgcagcgcgcagccggggtgggggggctctgggggtccctagcggggcagaccccgtctcaccggccccttctcctgcagctgctaatccagtgtttccacgtcgtgctggcctcccacctgcaggacgagttcaccgtgcaaatgcaagcggcgtgggacaagttcctgactggtgtggccgtggtgctgaccgaaaaataccgctgagccctgtgctgcgcaggccttggtctgtgcctgtcaataaacagaggcccgaaccatctgcccctgcctgtgtggtctttggggagctagcaaagcgaggtcactattgttggccagtgaagctcagggacctaaaaggagcctcctagaactctcaaatgcgccccacccccggaggtttgtcctcccatggcgaggagtgcgatggggcagagggagcactgtgatgtggcgggggtagggagggtggccttcgacttcaacccttgaatcgggcttccaaccatactgttcgcaaagcacttccccattcacgcatttattcattcattctccctccatccccacttcctgctgggacctgtagatgctaatcctggccctttttgcagagagatgcagaaactgaggtcccagagccaaatgtgcaacctaattcgttggcccagagcagagggctccgcagacctgttcctttccccttccttcccccatggacacttcctcagtggcaaacctgcgctagcctggttagccctccctgtgaccctgcagccctggggatgaggtcgggaggaagtcctcagtggccacaatttggcagacagagcaggtttagtcttccagcctgctcaatgacaagctgtgcgaccctgggcgtgtcccagagctctcaggcctttacctatcgaatagaaaaacaacgtccaactcacgagatttttgaaataatttttgaaatcataacacagggtgggtgcctgcagggtcgttgccaccccacccctccacccagccccagctgccgtgtctcaatctctgcaggtgcccaggccaaggcactcccttccccaggttccctcttctccctccccaggactgggaagggaatcttagggctccaccccaggcttttcagacaaagaataggggctgaggaaagagtgggaccttggaggtctccaaaccctgaatagggttggctctgggttggccatcctgggtctgtgtggggagcactggaccaggcctggcacccaggtctgacctggcagtcagcaacgaggtctgaagagagctgctggaagtggagccctgactgtgagtcggccaaactccccccagcagtcagtgccagtgacctgttgccctgcactgcctgggaccccagcccggtagtttggagaacttggccccacgttatctacatcccccaactgtttttttgtttttgggggttttttttttttttgctttgtttttgtttttgagataggcccttgctctgacaccccggctggagtgcagtggcacagttttggctcactgcagcctcaacctcctgggttcaagcgattctcctgcctctgtctcccgtgtagctgggattacaggcatgggccgccattcctggctaatttttgtatttttaatagagacacagtttcaccatgttgatcaggctggtctcaaactcctgacctcaagtgatctgccctcctcggtctcccaaagtgctgggatgacaggcgtgagccaccacacccagcccccgcaactgtttacatggataattaacagctttttgtcccaggcagagtttggtgtgaaagcagcttatgtttcactttggaaaaactgtgctcttctccccatccaggaagctgcctgggtctgggccatatgtggataccttatgggtataagctgctcaggaccctgtgtggaagctcaggacaatgccagcgggaaggctaccatgtggagagctggtctctgtttgggcaggactaagagacgcagggcagccttgggcaacctgtctactctcactcactcctcctcccctttcctgtgccaggcacctcctggcaacttgccagccaatgaccctgcatcccaggcataagagctcctactctcccccacctttcacttttgagcttacacagactcagaaataagctgccgtggtgctgtctcctgaggacaaggctaacaccaaggcggtctgggagaaagttggcaaccacactgctggctatgccacggaggccctggagaggcaagaaccctcctctccctgctcacaccttgggtccaacgcccactccagggctccactggccacccctaactattcttaccctggacccagcccccagcccctcactctttgcttccccctgaagcatgttcctgaccttcctctcacttggccctgagttatggctcagcccagatcaagaaacaatgcaagtaggtggccgacacgctgaccaatgccgtggtccacttagatgacatgcccaatgatgtgtctgagctgaggaagctgcatgtccacgagctgtgggtggacccaggcaacatcagggagagctttgggctgggaggaatctagggtgtgggggcagctggccttcctcataggacagaccctcccacgcgttcagggaggtggagcacaggtggcagtagtatctgcatcccctgactctctctccacagttcctgggtaaatgcctgctggtgacctaggcctgccacacccttcccagtttacccatgtggtgcctccatggacaaattatttgcttttgtgagtgctgtgttgacctaaaaacaccattaagctagagcattggtggtcatgccccctgcctgctgggcctcccaccaggccctcctcccctccctgccccagcacttcctgatctttgaatgaagtccgagtaggcagcagcctgtgtgtgcctgggttctctctgtcccggaatgtgccaacagtggaggtgtttacctgtctcagaccaaggacctctctgcagctgcatggggctggggagggagaactgcagggagtatgggaggggaagctgaggtgggcctgctcaagagaaggtgctgaaccatcccctgtcctgagaggtgccaggcctgcaggcagtggctcagaagctggggaggagagaggcatccagggttctactcagggagtcccagcatcgccaccctcctttgaaatctccctggttgaacccagttaacatacgctctccatcaaaacaaaacgaaacaaaacaaactagcaaaataggctgtccccaatgcaagtgcaggtgccagaacatttctctcattctcaccccttcctgccagagggtaggtggctggagtgagggtgctggccctactcacacttcctgtgtcatggtgaccctctgagagcagcccagtcagtggggaaggaggaaggggctgggatgctcacagccggcagcccacacctggggagactcttcagcagagcaccttgcggccttactcctgcacgtctcctgcagtttgtaaggtgcattcagaactcactgtgtgcccagccctgagctcccagctaattgccccacccagggcctctgggacctcctggtgcttctgcttcctgtgctgccagcaacttctggaaacgtccctgtccccggtgctgaagtcctggaatccatgctgggaagttgcacagcccatctggctctcagccagcctaggaacacgagcagcacttccagcccagcccctgccccacagcaagcctccccctccacactcacagtactgaattgagctttgggtagggtggagaggaccctgtcaccgcttttcttctggacatggacctctctgaattgttggggagttccctccccctctccaccacccactcttcctgtgcctcacagcccagagcattgttatttcaacagaaacactttaaaaaataaactaaaatccgacaggcacggtggctcacacctgtaatcccagtactttgggaggctgaggcgagaggatcacctgaggtcgggagtttgagaccagcctgaccaatatggagaaaccccagttatactaaaaatacaaaattagctgggtgtggtggcgcatgcctgtaatcctagctactaggaaggctgaggcaggagaatcgcttgaacccgggaggtggaggttgaggtgagctgagatcacgccattgcactccagcctgggcaacaagagcaaaactccgtctcaaaaaataaataaataaataaataaataaactaaaatctatccatgctttcacacacacacacacacacacacacacacacccttttttgtgttacttaaagtaggagagtgtctctctttcctgtctcctcacacccacccccagaagagaccaaaatgaagggtttggaactcagcccatgggccccatcccatgctgagggaacacagctacatctacaactactgccacaggctctctttttggacaaaaataccatcatactgtagatacctgtgtacaacttcctattctcagtgaagtgtctcccctgcatccctttcagccagttcattcagctctgcgccattccacagtctcactgattattactatgtttccatcatgatccccccaaaaaatcatgactttatttttttatttttattattattatttttttttttttttttgtgacggagtctcgctctgtcacccaggctggagtgcagtggcacaatctcggctcactgcaagctccacctcgcaggttcacgccattctcctccctcagcctcccgagtagctgagtagctgggactacaggcgccccccactacgcctggctaattttttctatttttaatagagacagagtttcactgcattagcgaggatggtctcgatctcctgacctcgcatctgcccgcctcagcctcccaatgtgctgggattacaggcgtgagccaccgcgcccggccttatgtatttatttttttgagacagagtctcgctgtgtcgtcaggctagagtgctgtggcacgatctcggctcactgcaacctccaactccctggttcaaaggattctccagcctccacctcccgagtagctgggattacaggcgtgcaccaccacacccagctaatttttgtatttttagtagagacggggtttctccatgttggtcagcctggtctcgaactcccgacctcagctgatccacccgccttggcctcccaaagtgctgggattacaggcgtgagccaccgagcctggccaaaccatcacttttcatgagcagggatgcacccactggcactcctgcacctcccaccctccccctcgccaagtccaccccttccttcctcaccccacatcccctcacctacattctgcaaccacaggggccttctctcccctgtcctttccctacccagagccaagtttgtttatctgtttacaaccagtatttacctagcaagtcttccatcagatagcatttggagagctgggggtgtcacagtgaaccacgacctctaggccagtgggagagtcagtcacacaaactgtgagtccatgacttggggcttagccagcacccaccaccccacgcgccaccccacaaccccgggtagaggagtctgaatctggagccgcccccagcccagccccgtgctttttgcgtcctggtgtttgttccttcccggtgcctgtcactcaagcacactagtgactatcgccagagggaaagggagctgcaggaagcgaggctggagagcaggaggggctctgcgcagaaattcttttgagttcctatgggccagggcgtccgggtgcgcgcattcctctccgccccaggattgggcgaagccctccggctcgcactcgctcgcccgtgtgttccccgatcccgctggagtcgatgcgcgtccagcgcgtgccaggccggggcgggggtgcgggctgactttctccctcgctagggacgctccggcgcccgaaaggaaagggtggcgctgcgctccggggtgcacgagccgacagcgcccgaccccaacgggccggccccgccagcgccgctaccgccctgcccccgggcgagcgggatgggcgggagtggagtggcgggtggagggtggagacgtcctggcccccgccccgcgtgcacccccaggggaggccgagcccgccgcccggccccgcgcaggccccgcccgggactcccctgcggtccaggccgcgccccgggctccgcgccagccaatgagcgccgcccggccgggcgtgcccccgcgccccaagcataaaccctggcgcgctcgcgggccggcactcttctggtccccacagactcagagagaacccaccatggtgctgtctcctgccgacaagaccaacgtcaaggccgcctggggtaaggtcggcgcgcacgctggcgagtatggtgcggaggccctggagaggtgaggctccctcccctgctccgacccgggctcctcgcccgcccggacccacaggccaccctcaaccgtcctggccccggacccaaaccccacccctcactctgcttctccccgcaggatgttcctgtccttccccaccaccaagacctacttcccgcacttcgacctgagccacggctctgcccaggttaagggccacggcaagaaggtggccgacgcgctgaccaacgccgtggcgcacgtggacgacatgcccaacgcgctgtccgccctgagcgacctgcacgcgcacaagcttcgggtggacccggtcaacttcaaggtgagcggcgggccgggagcgatctgggtcgaggggcgagatggcgccttcctctcagggcagaggatcacgcgggttgcgggaggtgtagcgcaggcggcggctgcgggcctgggccgcactgaccctcttctctgcacagctcctaagccactgcctgctggtgaccctggccgcccacctccccgccgagttcacccctgcggtgcacgcctccctggacaagttcctggcttctgtgagcaccgtgctgacctccaaataccgttaagctggagcctcggtagccgttcctcctgcccgctgggcctcccaacgggccctcctcccctccttgcaccggcccttcctggtctttgaataaagtctgagtgggcagcagcctgtgtgtgcctgggttctctctatcccggaatgtgccaacaatggaggtgtttacctgtctcagaccaaggacctctctgcagctgcatggggctggggagggagaactgcagggagtatgggaggggaagctgaggtgggcctgctcaagagaaggtgctgaaccatcccctgtcctgagaggtgccaggcctgcaggcagtggctcagaagctggggaggagagaggcatccagggttctactcagggagtcccagcatcgccaccctcctttgaaatctccctggttgaacccagttaacatacgctctccatcaaaacaaaacgaaacaaaacaaactagcaaaataggctgtccccagtgcaagtgcaggtgccagaacatttctctcattcccaccccttcctgccagagggtaggtggctggagtgagggtgctggccctactcacacttcctgtgtcacggtgaccctctgagagcagcccagtcagtggggaaggaggaaggggctgggatgctcacagccggcagcccacacctggggagactcttcagcagagcaccttgcggccttactcctgcacgtctcctgcagtttgtaaggtgcattcagaactcactgtgtgcccagccctgagctcccagctaattgccccacccagggcctctgggacctcctggtcttctgcttcctgtgctgccagcaacttctggaaacgtccctgtccccggtgctgaagtcctggaatccatgctgggaagttgcacagcccatctggctctcagccagcctaggaacatgagcagcacttccaacccagtccctgccccacagcaagcctccccctccacactcacagtactggattgagctttggggagggtggagaggaccctgtcactgctttccttctggacatggacctctctgaattgttggggagttccctcccctctccaccacccgctcttcctgcgcctcacagcccagagcattgttatttcagcagaaacactttaaaaaataaactaaaatccgacaggcacggtggctcacgcctgtaatcccagcactttgggaggccgaggtgggaggatcacctgaggtcgggagtttgagaccaccctgatcaacatgtagaaaccccatctatactaaaaatacaaaatcagccgggcatggtggcccatgcctgtaaacccacctactccggaggctgaggcaggagaatcattttaaccaaggaggcagaggttgcagtgagctaagatcacaccattgcactccagcctggaaaacaacagcgaaactccgcctcaaaaaaaaaaaagcccccacatcttatcttttttttttccttcaggctgtgggcagagtcagaagagggtggcagacagggaggggaaatgagaagatccaacgggggaagcattgctaagctggtcggagctacttccttctctgcccaaggcagcttaccctggcttgctcctggacacccagggcagggcctgagtaagggcctggggagacagggcagggagcaggctgaagggtgctgacctgatgcactcctcaaagcaagatcttctgccagacccccaggaaatgacttatcagtgatttctcaggctgttttctcctcagtaccatccccccaaaaaacatcacttttcatgcacagggatgcacccactggcactcctgcacctcccacccttccccagaagtccaccccttccttcctcaccctgcaggagctggccagcctcatcaccccaacatctccccacctccattctccaaccacagggcccttgtctcctctgtcctttcccctccccgagccaagcctcctccctcctccacctcctccacctaatacatatccttaagtctcacctcctccaggaagccctcagactaaccctggtcaccttgaatgcctcgtccacacctccagacttcctcagggcctgtgatgaggtctgcacctctgtgtgtacttgtgtgatggttagaggactgcctacctcccagaggaggttgaatgctccagccggttccagctattgctttgtttacctgtttaaccagtatttacctagcaagtcttccatcagatagcatttggagagctgggggtgtcacagtgaaccacgacctctaggccagtgggagagtcagtcacacaaactgtgagtccatgacttggggcttagccagcacccaccaccccacgcgccaccccacaaccccgggtagaggagtctgaatctggagccgcccccagcccagccccgtgctttttgcgtcctggtgtttattccttcccggtgcctgtcactcaagcacactagtgactatcgccagagggaaagggagctgcaggaagcgaggctggagagcaggaggggctctgcgcagaaattcttttgagttcctatgggccagggcgtccgggtgcgcgcattcctctccgccccaggattgggcgaagcctcccggctcgcactcgctcgcccgtgtgttccccgatcccgctggagtcgatgcgcgtccagcgcgtgccaggccggggcgggggtgcgggctgactttctccctcgctagggacgctccggcgcccgaaaggaaagggtggcgctgcgctccggggtgcacgagccgacagcgcccgaccccaacgggccggccccgccagcgccgctaccgccctgcccccgggcgagcgggatgggcgggagtggagtggcgggtggagggtggagacgtcctggcccccgccccgcgtgcacccccaggggaggccgagcccgccgcccggccccgcgcaggccccgcccgggactcccctgcggtccaggccgcgccccgggctccgcgccagccaatgagcgccgcccggccgggcgtgcccccgcgccccaagcataaaccctggcgcgctcgcggcccggcactcttctggtccccacagactcagagagaacccaccatggtgctgtctcctgccgacaagaccaacgtcaaggccgcctggggtaaggtcggcgcgcacgctggcgagtatggtgcggaggccctggagaggtgaggctccctcccctgctccgacccgggctcctcgcccgcccggacccacaggccaccctcaaccgtcctggccccggacccaaaccccacccctcactctgcttctccccgcaggatgttcctgtccttccccaccaccaagacctacttcccgcacttcgacctgagccacggctctgcccaggttaagggccacggcaagaaggtggccgacgcgctgaccaacgccgtggcgcacgtggacgacatgcccaacgcgctgtccgccctgagcgacctgcacgcgcacaagcttcgggtggacccggtcaacttcaaggtgagcggcgggccgggagcgatctgggtcgaggggcgagatggcgccttcctcgcagggcagaggatcacgcgggttgcgggaggtgtagcgcaggcggcggctgcgggcctgggccctcggccccactgaccctcttctctgcacagctcctaagccactgcctgctggtgaccctggccgcccacctccccgccgagttcacccctgcggtgcacgcctccctggacaagttcctggcttctgtgagcaccgtgctgacctccaaataccgttaagctggagcctcggtggccatgcttcttgccccttgggcctccccccagcccctcctccccttcctgcacccgtacccccgtggtctttgaataaagtctgagtgggcggcagcctgtgtgtgcctgagttttttccctcagcaaacgtgccaggcatgggcgtggacagcagctgggacacacatggctagaacctctctgcagctggatagggtaggaaaaggcaggggcgggaggaggggatggaggagggaaagtggagccaccgcgaagtccagctggaaaaacgctggaccctagagtgctttgaggatgcatttgctctttcccgagttttattcccagacttttcagattcaatgcaggtttgctgaaataatgaatttatccatctttacgtttctgggcactcttgtgccaagaactggctggctttctgcctgggacgtcactggtttcccagaggtcctcccacatatgggtggtgggtaggtcagagaagtcccactccagcatggctgcattgatcccccatcgttcccactagtctccgtaaaacctcccagatacaggcacagtctagatgaaatcaggggtgcggggtgcaactgcaggccccaggcaattcaataggggctctactttcacccccaggtcaccccagaatgctcacacaccagacactgacgccctggggctgtcaagatcaggcgtttgtctctgggcccagctcagggcccagctcagcacccactcagctcccctgaggctggggagcctgtcccattgcgactggagaggagagcggggccacagaggcctggctagaaggtcccttctccctggtgtgtgttttctctctgctgagcaggcttgcagtgcctggggtatcagagggagggttcccggagctggtagccataaagccctggccctcaactgataggaatatcttttattccctgagcccatgaatcacccttggtaaacacctatggcaggccctctgcctgcgtttgtgatgtccttcccgcagcctgtgggtacagtatcaactgtcaggaagacggtgtcttcgttatttcatcaggaagaatggaggtctgacctaaaggtagaaatatgtcaaatgtacagcagagggctggttggagtgcagcgctttttacaattaattgatcagaaccagttataaatttatcatttccttctccactcctgctgcttcagttgactaagcctaagaaaaaattataaaaattggccgggcgcggtggctcacacctgtaattgcagcactttgccaggcttaggcaggtggatcacctgaagtcaggggttcgagaccagcctagccaacatagtgaaaccctgtctctactaaaaagacaaaaattgtccaggtgtgatgactcatgcctgtaaacctggcactttgggaggcggaggttgtagtgagtcaagatcgcgccatcgcactccagcttgggcaacaagagcgaaactctgtctcaaaaaaaaatttaatctaatttaatttaatttaaaaattagcacggtggttgggcacagtggctcacgcctgtaatcccagcactttgggaagccaaggtgggcagatcacaaggtcaggaattcgagaccagcctggccaatatggggaaaccccatctctactaaaaatacaaaaaattagccgggtgtggtggcgcacgcctgtaatcccagctactcgggaggttgaggtaggagaatcacttgaacccaggaggcagaggttgcagtgacccgagatcacaccattgcactctagcctgggcaacaagagcaaaactccatctcaaaaaaaattataaaaattatacatcagtagatgaatgggtaaacaaaatgtggtggtctatacacacaatggaatattatttggccacaaaaagaaatgaagcactgataggatgtagctgcaccctgaaaatatttgacaagtaaaagaagccggacaccaaaggtcacaaactgcatgaccccatctatatgcaatatccgctacagccaaatccatagggaccaaaagcggattagtggctgccggggccagagttactgttaatgagtaccgaggtggcgtttgggatgatgaaaaagttctgacctagatagtggtgatggctgcataacactaagtgttcttaatatcaccaaattttatacctgaaaaatggctacaatggtaatttatgtctattttatcaccttttttaaaacaaaaaagatataaggggtacagcagagtgagtgctgcatatgcatttactattattcttgggttacatcccaggtactcaataaatgttcactgccctgaagaaacacctgctacgagtcaggcacctcacagttgttatccgtttaattctcacaatctgagaagaaactgtcaccctcattttatataataaatgagaaaacagactcgggcaagtgtcacaatagaatcaagaggcagaataaactgacttccaatgccaaatccatgccgaaattcagtgctataataatgtacatggccgggcgcggtggttcacgcctgtaatcccagaactttgggaggctgaggcgggaggatcacctgaggtcgggagtttgagatcagcctaacacggtgaaaccctgtctctactaaaaatacaaaattggcatggtggcatgcacctgtgatcccagttactcgggaggctgaggcaggagaatcgtttgaacccgggaggcggaggttgcagtgagccggaatggcgccactgcactcaccgcacccggccaatttttgtgtttttagtagagactaaataccatatagtgaacacctaagacggggggccttggatccagggcgattcagagggccccggtcggagctgtcggagattgagcgcgcgcggtcccgggatctccgacgaggccctggacccccgggcggcgaagctgcggcgcggcgccccctggaggccgcgggacccctggccggtccgcgcaggcgcagcggggtcgcagggcgcggcgggttccagcgcggggatggcgctgtccgcggaggaccgggcgctggtgcgcgccctgtggaagaagctgggcagcaacgtcggcgtctacacgacagaggccctggaaaggtgcggcaggctgggcgcccccgcccccaggggccctccctccccaagccccccggacgcgcctcacccacgttcctctcgcaggaccttcctggctttccccgccacgaagacctacttctcccacctggacctgagccccggctcctcacaagtcagagcccacggccagaaggtggcggacgcgctgagcctcgccgtggagcgcctggacgacctaccccacgcgctgtccgcgctgagccacctgcacgcgtgccagctgcgagtggacccggccagcttccaggtgagcggctgccgtgctgggcccctgtccccgggagggccccggcggggtgggtgcggggggcgtgcggggcgggtgcaggcgagtgagccttgagcgctcgccgcagctcctgggccactgcctgctggtaaccctcgcccggcactaccccggagacttcagccccgcgctgcaggcgtcgctggacaagttcctgagccacgttatctcggcgctggtttccgagtaccgctgaactgtgggtgggtggccgcgggatccccaggcgaccttccccgtgtttgagtaaagcctctcccaggagcagccttcttgccgtgctctctcgaggtcaggacgcgagaggaaggcgccgcccctccccaaggaaaggcgagggcctggggcacacccccagtgcccagatccaggcgcgcctctttccacctccagcaggtttggggcctcggccatgggggcaccgaactgcgtgcagcctgaccctcccgaatggggtggtaggtgagggccgcgggacgccccgggcggcgggctgcgaggacggccgactctgcccatcccgagggcggctggcttcgccctccccactctgcgccgagcacgcggcccggacccaccgcgagaactccgcacctgcagcgtgaacgcacgcgggcggcgttaagggcccggggctgactcggagcaggttagggaacagcgccccctcccggcgcgagccggtacctgcgcagcacccagccgccgcggctgtggcctggaatcggggacctggggtgccggggggttgtggtgaaggaggtgggaccagccccagcacctagccacgtagctggcgaggtggaccaggaaccgacccagacccctgccgtcacccgacatcactacggagagtgaagcttttttatatttgtccacataaaaccaatcatggtcattgtagaacttccgaaaacaaggcttgctgcaccttcctgtgtatcccaggtccaggaatgggtgcagcacatccttcagctgccgcttgacacgcggcaaactgtgtcatgtgtaaacaagaacaggacatggctgtcatatccaagagcacatgtgtaacacagacatgccacacacacacacacacacacacggggtagaggcaggcctcatccacacccctaacatttgatgcgtagctgttccagtcttctaggcacatgtagagatgcttttcctcagaaatggtattctcaaggtgacactgaggaaaagtggacaggccgggcgcggtggctcacgcctgtaatcccagcactccgggaggccgaggcgggcggatc

SEQ ID NO: 3320 - DNA, 4268 bp, Homo sapiens
cccaaggaccactcttctgcgtttggagttgctccccacaaccccgggctcgtcgctttctccatcccgacccacgcggggcgcggggacaacacaggtcgcggaggagcgttgccattcaagtgactgcagcagcagcggcagcgcctcggttcctgagcccaccgcaggctgaaggcattgcgcgtagtccatgcccgtagaggaagtgtgcagatgggattaacgtccacatggagatatggaagaggaccggggattggtaccgtaaccatggtcagctggggtcgtttcatctgcctggtcgtggtcaccatggcaaccttgtccctggcccggccctccttcagtttagttgaggataccacattagagccagaagagccaccaaccaaataccaaatctctcaaccagaagtgtacgtggctgcgccaggggagtcgctagaggtgcgctgcctgttgaaagatgccgccgtgatcagttggactaaggatggggtgcacttggggcccaacaataggacagtgcttattggggagtacttgcagataaagggcgccacgcctagagactccggcctctatgcttgtactgccagtaggactgtagacagtgaaacttggtacttcatggtgaatgtcacagatgccatctcatccggagatgatgaggatgacaccgatggtgcggaagattttgtcagtgagaacagtaacaacaagagagcaccatactggaccaacacagaaaagatggaaaagcggctccatgctgtgcctgcggccaacactgtcaagtttcgctgcccagccggggggaacccaatgccaaccatgcggtggctgaaaaacgggaaggagtttaagcaggagcatcgcattggaggctacaaggtacgaaaccagcactggagcctcattatggaaagtgtggtcccatctgacaagggaaattatacctgtgtggtggagaatgaatacgggtccatcaatcacacgtaccacctggatgttgtggagcgatcgcctcaccggcccatcctccaagccggactgccggcaaatgcctccacagtggtcggaggagacgtagagtttgtctgcaaggtttacagtgatgcccagccccacatccagtggatcaagcacgtggaaaagaacggcagtaaatacgggcccgacgggctgccctacctcaaggttctcaaggccgccggtgttaacaccacggacaaagagattgaggttctctatattcggaatgtaacttttgaggacgctggggaatatacgtgcttggcgggtaattctattgggatatcctttcactctgcatggttgacagttctgccagcgcctggaagagaaaaggagattacagcttccccagactacctggagatagccatttactgcataggggtcttcttaatcgcctgtatggtggtaacagtcatcctgtgccgaatgaagaacacgaccaagaagccagacttcagcagccagccggctgtgcacaagctgaccaaacgtatccccctgcggagacaggtaacagtttcggctgagtccagctcctccatgaactccaacaccccgctggtgaggataacaacacgcctctcttcaacggcagacacccccatgctggcaggggtctccgagtatgaacttccagaggacccaaaatgggagtttccaagagataagctgacactgggcaagcccctgggagaaggttgctttgggcaagtggtcatggcggaagcagtgggaattgacaaagacaagcccaaggaggcggtcaccgtggccgtgaagatgttgaaagatgatgccacagagaaagacctttctgatctggtgtcagagatggagatgatgaagatgattgggaaacacaagaatatcataaatcttcttggagcctgcacacaggatgggcctctctatgtcatagttgagtatgcctctaaaggcaacctccgagaatacctccgagcccggaggccacccgggatggagtactcctatgacattaaccgtgttcctgaggagcagatgaccttcaaggacttggtgtcatgcacctaccagctggccagaggcatggagtacttggcttcccaaaaatgtattcatcgagatttagcagccagaaatgttttggtaacagaaaacaatgtgatgaaaatagcagactttggactcgccagagatatcaacaatatagactattacaaaaagaccaccaatgggcggcttccagtcaagtggatggctccagaagccctgtttgatagagtatacactcatcagagtgatgtctggtccttcggggtgttaatgtgggagatcttcactttagggggctcgccctacccagggattcccgtggaggaactttttaagctgctgaaggaaggacacagaatggataagccagccaactgcaccaacgaactgtacatgatgatgagggactgttggcatgcagtgccctcccagagaccaacgttcaagcagttggtagaagacttggatcgaattctcactctcacaaccaatgaggaatacttggacctcagccaacctctcgaacagtattcacctagttaccctgacacaagaagttcttgttcttcaggagatgattctgttttttctccagaccccatgccttacgaaccatgccttcctcagtatccacacataaacggcagtgttaaaacatgaatgactgtgtctgcctgtccccaaacaggacagcactgggaacctagctacactgagcagggagaccatgcctcccagagcttgttgtctccacttgtatatatggatcagaggagtaaataattggaaaagtaatcagcatatgtgtaaagatttatacagttgaaaacttgtaatcttccccaggaggagaagaaggtttctggagcagtggactgccacaagccaccatgtaacccctctcacctgccgtgcgttctggctgtggaccagtaggactcaaggtggacgtgcgttctgccttccttgttaattttgtaataattggagaagatttatgtcagcacacacttacagagcacaaatgcagtatataggtgctggatgtatgtaaatatattcaaattatgtataaatatatattatatatttacaaggagttattttttgtattgattttaaatggatgtcccaatgcacctagaaaattggtctctctttttttaatagctatttgctaaatgctgttcttacacataatttcttaattttcaccgagcagaggtggaaaaatacttttgctttcagggaaaatggtataacgttaatttattaataaattggtaatatacaaaacaattaatcatttatagttttttttgtaatttaagtggcatttctatgcaggcagcacagcagactagttaatctattgcttggacttaactagttatcagatcctttgaaaagagaatatttacaatatatgactaatttggggaaaatgaagttttgatttatttgtgtttaaatgctgctgtcagacgattgttcttagacctcctaaatgccccatattaaaagaactcattcataggaaggtgtttcattttggtgtgcaaccctgtcattacgtcaacgcaacgtctaactggacttcccaagataaatggtaccagcgtcctcttaaaagatgccttaatccattccttgaggacagaccttagttgaaatgatagcagaatgtgcttctctctggcagctggccttctgcttctgagttgcacattaatcagattagcctgattctcttcagtgaattttgataatggcttccagactctttgcgttggagacgcctgttaggatcttcaagtcccatcatagaaaattgaaacacagagttgttctgctgatagttttggggatacgtccatctttttaagggattgctttcatctaattctggcaggacctcaccaaaagatccagcctcatacctacatcagacaaaatatcgccgttgttccttctgtactaaagtattgtgttttgctttggaaacacccactcactttgcaatagccgtgcaagatgaatgcagattacactgatcttatgtgttacaaaattggagaaagtatttaataaaacctgttaatttttatactgacaataaaaatgtttctacagatattaatgttaacaagacaaaataaatgtcacgcaacttaaaaaaaaaaaaaaaa

SEQ ID NO: 3321 - DNA, 1356 bp, Homo sapiens; identical to SEQ ID NO: 2752

SEQ ID NO: 3322 - DNA, 2660 bp, Homo sapiens
cacgagaagacaggaggaagaaagggagagagggccaggcagtcgcactgtgaacagaacaggagaaggcgaagcggggcaaagttccctgcccaccgacgccagcctgcttggatgacttgcctcgtttcataattcacttactgtctgcaccagccggcctcagcctggctggaccctgctgcctgtgtggcccggagccagaggcccccacactcccagctgctcttctacagatgccatcaacgagcaggactctgggtggctccactgtctaagcctggagagtcaccgccgagggatgaggacgcgccagcccgggggaacgcgccagctgctttcgcggccccaagcgcgcagtgcccagcagccgcgccgagcctgacacgctgtcctctcccctcgcgcacagggctctgcgagtgacccggcgggcgagctccgtgctgcatggaacggctgcagaagcaaccacttacctcccccgggagcgtgagcccctcccgagattccagtgtgcctggctctccctccagcatcgtggccaagatggacaatcaggtgctgggctacaaggacctggctgccatccccaaggacaaggccatcctggacatcgagcggcccgacctcatgatctacgagcctcacttcacttattccctcctggaacacgtggagctgcctcgccagcgcgagcgctcgctgtcacccaaatccacatcccccccaccatccccagaggtgtgggcggacagccggtcgcctggaatcatctctcaggcctcggcccccagaaccactggaaccccccggaccagcctgccccatttccaccaccctgagacctcccgcccagattccaacatctacaagaagcctcccatctataagcagagagagtccgtgggaggcagccctcagaccaagcacctcatcgaggatctcatcatcgagtcatccaagtttcctgcagcccagcccccagaccccaaccagccagccaaaatcgaaaccgactactggccatgccccccgtctctggctgttgtggagacagaatggaggaagcggaaggcgtctcggaggggagcagaggaagaggaggaggaggaagatgacgactctggagaggagatgaaggctctcagggagcgtcagagagaggaactcagtaaggttacttccaacttgggaaagatgatcttgaaagaagagatggaaaagtcattgccgatccgaaggaaaacccgctctctgcctgaccggacacccttccatacctccttgcaccagggaacgtctaaatcttcctctctcccccgctatggcaggaccaccctgagccggctacagtccacggagttcagcccatcagggagtgagactggaagcccaggcctgcagatctatccctatgaagtgctagtggtgaccaacaaggggcgaaccaagctgccaccgggggtggatcggatgcggcttgagaggcatctgtctgccgaggacttctcaagggtatctgccatgtcccctgaagagtttggcaagctggctctgtggaagcggaatgagctcaagaagaaggcctctctcttctgatggcccccacctgctccgggacggcccccttacccctgctgcttcagggtttttccccggcgggttgggaggggcaggaggtggggtggaaatagggtgggctcctttcctcaggtagagtggggggccaaaacctctgcagtccccggcagtgagctatggactttcttccccctcacgaggctgggggcctcctgctctcgtccctggccctccctgtacagggcaaagccagtctgggctctggcacacagagttcatgtttgccgccctctccctgcccctcaccccagaggtgagaggaatgaggggcattggtggttaggccggttggctgtcttgaacagctggagggaagatgcaggggtgggaagcggccaggcagaaagagctccaggctcttgtgtcgcccacccagccctcccatactcactcctgacagctttcctgcactgcagcttcctgctcctctgactctagtgggaacaggccccagctcagcctccgcgagggaggtcacccctccacttcagcttgccctgacctccgctcgcaaaccccgagcttccaagccttttgctccagccctgcggcttccccagaagcctgggcttagggtggagatgccgcctacccgatcctggccctccacctgcctccaggccacgaaatgggaattccagcactaagccaggcaccgggcagaagctgggccttccgcctcccttggatggggtcaagaggccaggcctggcacattttggagtgtcctggctaccagctctcacacctacacccacgcaccccctcacacactatgctctctcaagaatgtaatttattggggcccccccagctgctttcctcacctgcccctgccctaccttacacccccagcttgacttctttccagtccacgtggatataatgatatctatatttttgcccaggtctgggtattgctcctgcccagaccctgacatccctttccactgtgtgtgtgaccatgctgggggagggggactctgcttggaattaaaaggttgctttgggtccct

SEQ ID NO: 3323 - DNA, 402 bp, Homo sapiens
gtgaactgagccacccactcccaaacaggaaaccctggtgaaggttcaggaagcacggagattctctccaacaaaggtccagttaggaaacgacgctgagaggatgacgacaacgtgcaacagcagaaagatgcttgcaagcagagtcagggtcaccagtgaatgccacaaaagttctctttcccactgtttaatttgacaagagaagaatttgaaggatatgaacattttcaagaactctgctgaggtcacttagagcgccatcacaacttatttgtgtgactaattgcctagattgtaagctctttgagggcagggcttgtctcttacacatctttataatcccctgcagcggctttcagtattttgtacttgtaggcacctaataaatttattatttgc

SEQ ID NO: 3324 - DNA, 459 bp, Homo sapiens
  misc_feature (1)..(459): n=a,t,g or c
aaattactaaaagatgcaattcaaagataggtcccagtttaacactgaattgcttgacttctgtggcttttctttttctggccacatttatttatttaagcaatttttgtatgccttgttatttcatttccatagagattatattgtatcagtgtttatgtaagctggaatcatcctcagttttttgctgataatttttcaaataaagatacatggataattgtaaaatacactaactcttagggtgttgtagtagctgaaacatggagatgcgtantgtcatgctttttctgaatggacaggagaaacataagctacggagtaattcacttctgaggatgcttttccggaaaaagaaaggctagaaaatactccgcacttcctccagaaccctctttcctggtaacgggtatcctttgttggtgtgttttgctcntacattacagatagactaaccat

SEQ ID NO: 3325 - DNA, 466 bp, Homo sapiens
gtccagtgccaaaaattttagagtttgagaaggtcacagaaatcctctagttggtgcctccacagtcttcaattttacagaggaactcagggctaatggagttaatgcaactagatcagggttttgggtctgtgttctttctaccgtcagcacctgtgtggtcaattctggacacttcccagagaagtctttgagtagagaatcctactcaaatttcactgtatattttaagcattcctctcctttccctttgcctcccctgttgccttttcttcccctgatttctcctctggtcatctcctctcccttctgcgtgtaagccatgggaaagggatgagggaggacagcttctggttaaacacaggtccctcttccacatcaaatgaacattggcttcctgggacagaaggccttcaaaggagggattgcaaagcaaggcaaagcgttctgtcttcattttccccat

SEQ ID NO: 3326 - DNA, 622 bp, Homo sapiens
  misc_feature (1)..(622): n=a,t,g or c
ctcctcccttccttcaggcctcttagcattgtttgttttcccatttctgatactactactccatgctgaagatttgccatattactattttggaaacattgagtgatagaactcctagaaaatttgcaaagaaatgttacatactgtatatcaaactctcagattctagtgttgaaaaagtagcctatactttgctattacttatacctgctgccatagaaaaaaataagtttattcatgacacatttacatttgatcataaataaaagaaaaaagggcacctttttggagttagtcatggtagtcattagtgatatttctgaacagttcttaatttaaaatacttcaaaggaagtaaaggtcatggcttagctgaaggaaatgctccagaaattggactgtgtaaaccatcagtacaataatacgctgtgtatgtatgtgtatataaatgagaattatgggcatattggagcattgcattaatccacaaactcncattgagacaaaccttagtttacagctgtctgattaaagccagtggtccagttgctgtgaagaatagccccttcaaatacttggaaagtggtacctggaacctgtaaggattcntttaaatttaacc

SEQ ID NO: 3327 - DNA, 103 bp, Homo sapiens; identical to SEQ ID NO: 2074

SEQ ID NO: 3328 - DNA, 442 bp, Homo sapiens
ggcgctgcagaatgctccactgccagccggccccctgcctcggttcccttctgtttagtggcgacacaggcacccagctttggggtggtgctgacgctcccaggggtgccaggagccactgggacagggtgaggctcccagacgctcctcgaggtgcccagctctccagggagcttctggcccaaggccgtctgagggatctgctccttaaccccccagtgccttggcgagggcaggttccaagccacagacgcctgccctgagtggactctgcggccagtccctggtgccctcctggccctgctgcccagtgagggctcctacgggtgggttcattggcctgggccagcaagcccccacctgcattgaccttaggcccatagagagggctgtcccggtgctgccccagccaggatctggtcgctgccccaggggactgatg

SEQ ID NO: 3329 - DNA, 340 bp, Homo sapiens
  misc_feature (1)..(340): n=a,t,g or c
attcggcacgagtttcaaagaaaatagattaggtttgcgggggtctgagtctatgttcaaagactgtgaacagcttgctgtcacttcttcacctcttccactccttctctcactgtgttactgctttgcaaagacccgggagctggcggggaaccctgggagtagctagtttgctttttncgtacacagagaaggctatgtaaacaaaccacagcaggatcgaagggtttttagagaatgtgtttcaaaaccatgcctggtattttcaaccataaaagaagtttcagttgtccttaaatttgtataacggtttaattctgtcttgttcatttgagtattt

SEQ ID NO: 3330 - DNA, 493 bp, Homo sapiens
tgcgctcattggcagacttatgtttcaggcatgttgagatttggaaaagtggatgtaactgaaattcagatagctttagtgattgtctttgtgttgtctgcatttggaggagcaacaatgtgggactatacgattcctattctagaaataaaattgaagatccttccagttcttggatttctaggtggagtaatattttcctgttcaaattatttccatgttatcctccatggtggtgttggcaagaatggatccactatagcaggcaccagtgtcttgtcacctggactccacataggactaattattatactggcaataatgatctataaaaagtcagcaactgatgtgtttgaaaagcatccttgtctttatatcctaatgtttggatgtgtctttgctaaagtctcacaaaaattagtggtagctcacatgaccaaaagtgaactatatcttcaagacactgtctttttggggccaggcttttgttttt

SEQ ID NO: 3331 - DNA, 437 bp, Homo sapiens
atttcacctactatttctgaatatattttgcaaattgaattggaataggaattgatatagcagtcttaaacattagtagtgggatttggctatggtccagactgtgctccttatagagaatttgatctgctcagtgtgagcggtttgctgttagccagggctatttatggcaaacacatgcttttgtatcttgtcatagttatccacaaatggcaaaactggacttgattctactggtatgcaaaacaggcatgctagtaagcagtcagtcgtggctcagaacttaaccccatagctcagaggaatgcttttagcagaaaacaggaaagaaaatatcccttaaaatttttttttgaatgtgtggaagtaattttagtataattagattttttccatatttttgaaagatttttcagatgtgaacattaaaataggga

SEQ ID NO: 3332 - DNA, 444 bp, Homo sapiens
tagctctaggtgtgcccctgaatcagttcatggtagattatgctgaacaacagtgagatgttattggaggtgtggatgagggagtttgttgttgcagtccttctttgcaccttattttaaagaataaatgaaacatttttctggttacttttttaaaaatttaaaatggaagggaagaataggggcagggcattattaggctatttctgatgcttcagtgttataaattcaacatagaggctgacaacctaaattcatggtgtaacacagctcttttccttttcctttttttttttttttttggtatctgttcaatgaaaataaggtatgacccaagtttttacctagtctgactagaagtattccacttcaaggtctgaagtaggacttttaccttaaaaaacaacaacaaacaaaactatcacacaggatagataagaagat

SEQ ID NO: 3333 - DNA, 335 bp, Homo sapiens
tccctccctgggcccggcctggacccgtcaggtgcctgtccccagcaccaaccccactcatgccccatcgtcctcccagacaaatgaaaccacgctgcgcttccgatgcccccgctagccgtgtaatggttcagctaatcccatggcgagatgggggctcactccggaggagagccaggcagcagggccttcctgaccaacagccagctctgtccttccccccaggaaacacatgttcatttgtgtgatcatgtatagacctcagaacggaagataggactgtatataattgtaataaataccagttgccactaaaaaaaaaaaaaaaaaaaacc

SEQ ID NO: 3334 - DNA, 7621 bp, Homo sapiens
gctcctcggacctcatctcttccccagggaagaagggggccgctcatcctgaccccagcaagacctctgtagacacagggaaagtcagtcggccagagaatcccagccagcctgcatcgcccagggtcgccaagtgcaaggccaggtctccagtcaggctcccccatgagggcagcccctccccaggggagaaagcagcggctccccctgactacagcaagactcgatcagcatcggaaaccagcacaccccacaataccaggagggtggctgccctcaggggagcgggacctggagcagagggaatgacaccagctggtgctgtcctgccaggagaccccctcacatcccaggagcagagacagggagctccaggtaaccacagtaaggctctggaaatgacaggaatccatgcacctgaaagctcccaggagccttccctgctggagggagcagattctgtgtcctcaagggcaccgcaggccagcctctccatgctgccatccactgacaacaccaaagaagcatgtggccatgtctcggggcactgctgcccgggggggagtagagagagccctgtgacggacattgacagcttcatcaaggagctggatgcttctgcagcaaggtctccgtcttcccagacgggggacagtggctctcaggagggcagtgctcagggccacccaccagccggggctggaggtgggagctcctgccgtgccgaaccagtcccggggggccagacctcctccccgaggagggcctgggctgctggtgcccccgcctacccacaatgggcctcccagccttcggttttagattcaattaatcccgacaaacattttactgtgaacaaaaactttctgagcaactactctagaaattttagcagttttcatgaagacagcacctccctatcaggcctgggtgacagcacggagccgtctctgtcatccatgtatggcgatgctgaggattcttcttctgaccctgagtcactcactgaagccccacgagcttctgccagggacggctggtcccctcctcgttcccgtgtgtctttgcacaaggaagatccttcggagtcagaagaggaacagattgagatttgttccacacgtggctgccccaatccaccctcgagtcctgctcatcttcccacccaggctgccatctgtcctgcctcagccaaagttctgtcattaaaatacagcactccgagagagtcggtggccagtccccgtgagaaggtcgcctgcttgccaggctcatacacttcaggcccagactcttcccagccatcatcactcttggagatgagctctcaggagcatgaaactcatgcggacataagcacttcacagaaccacaggccctcgtgtgcagaagaaaccacagaagtcaccagcgctagctcagccatggaaaacagtccgctgtctaaagtagccaggcattttcacagtccgcccatcattctcagctcccccaacatggtaaatggcttggaacatgacctgctagatgacgaaaccctgaatcaatacgaaacaagcattaatgcagctgccagtctgtcctccttcagtgtggatgtccctaagaatggagaatctgttttggaaaacctccacatctctgaaagtcaagacctggatgacttgctacagaaaccaaaaatgatcgctaggaggcccatcatggcctggtttaaagaaataaataaacataaccaaggcacacatttgaggagcaaaaccgagaaggaacaacctctaatgcctgccagaagtcccgactccaagattcagatggtgagttcaagccaaaaaaagggcgttactgtgcctcatagccctcctcagccgaaaacaaacctggaaaataaggacctgtctaagaagagtccggcagaaatgcttctgactaatggtcagaaggcaaagtgtggtccgaagctgaagaggctcagcctcaagggcaaggccaaagtcaactctgaggcccctgctgcgaatgctgtgaaggctggggggacggaccacaggaaacccttgatctcaccccagacctcccacaaaacactttctaaggcagtgtcacagcggctccatgtagccgaccacgaggaccctgacagaaacaccacagctgcccccaggtccccccagtgtgtgctggaaagcaagccacctcttgccacctctgggccactgaaaccctcagtgtctgacacgagcatcaggacatttgtctcgcccctgacctctcccaagcctgttcctgagcaaggcatgtggagcaggttccacatggctgtcctctctgaacccgacagaggttgcccaaccacccctaaatctcctaagtgtagagcagagggcagggcgccccgtgctgactccgggccggtgagtccggcagcgtctaggaacggcatgtccgtggcagggaacagacagagtgagccgcgcctggccagccatgtggcagcagacacagcccaacccaggccgactggcgaaaaaggaggcaacataatggccagcgatcgcctcgaaagaacaaaccagctgaaaatcgtggagatttctgctgaagcagtgtcagagactgtatgtggtaacaagccagctgaaagcgacagacggggagggtgcttggcccagggcaactgtcaggagaagagtgaaatcaggctctatcgccaggtcgcagaatcatccacaagtcatccatcctcactcccatctcatgcctcccaggcagagcaggaaatgtcacgatcattcagcatggcaaaactggcgtcctcctcctcctcccttcaaacagccattagaaaggcagaatactcccagggaaaatcaagcctgatgtcagactcccgaggggtgcccagaaacagcattccagggggcccctcgggggaggaccatctctacttcaccccaaggccagcgaccaggacctactccatgccagcccagttctcaagccattttggacgggagggtcaccccccacacagcctgggtcgctctcgggacagccaggtccctgtgacaagcagtgttgtccccgaggcaaaggcatccagaggtggtcttcccagcctggctaatggacagggcatatatagtgtaaagccgctgctggacacatcgaggaatcttccagccacagatgaaggggatatcatttcagtccaggagacgagctgcctagtcacagacaaaatcaaagtcaccagacgacactactgctatgagcagaactggccccatgaatctacctcatttttctctgtgaagcagcggatcaagtcttttgagaacctggccaatgctgaccggcctgtagccaagtccggggcttccccatttttgtcggtgagctccaagcctcccattgggaggcggtcttccggcagcattgtttccgggagcctgggccacccaggtgacgcagcagcaaggttgttgagacgcagcttgagttcctgcagcgaaaaccaaagcgaagccggcaccctcctgccccagatggccaagtctccctcaatcatgacactgaccatctctcggcagaacccaccagagaccagtagcaagggctctgattcggaactaaagaaatcacttggtcctttgggaattcccaccccaacgatgaccctggcttctcctgttaagaggaacaagtcctcggtacgccacacgcagccctcgcccgtgtcccgctccaagctccaggagctgagagccttgagcatgcctgaccttgacaagctctgcagcgaggattactcagcagggccgagcgccgtgctcttcaaaactgagctggagatcacccccaggaggtcacctggccctcctgctggaggcgtttcgtgtcccgagaagggcgggaacagggcctgtccaggaggaagtggccctaaaaccagtgctgctgagacacccagttcagccagtgatacgggtgaagctgcccaggatctgccttttagaagaagctggtcagttaatttggatcaacttctagtctcagcgggggaccagcaaagattacagtctgttttatcgtcagtgggatcgaaatctaccatcctaactctcattcaggaagcgaaagcacaatcagagaatgaagaagatgtttgcttcatagtcttgaatagaaaagaaggctcaggtctgggattcagtgtggcaggagggacagatgtggagccaaaatcaatcacggtccacagggtgttttctcagggggcggcttctcaggaagggactatgaaccgaggggatttccttctgtcagtcaacggcgcctcactggctggcttagcccacgggaatgtcctgaaggttctgcaccaggcacagctgcacaaagatgccctcgtggtcatcaagaaagggatggatcagcccaggccctctgcccggcaggagcctcccacagccaatgggaagggtttgctgtccagaaagaccatccccctggagcctggcattgggagaagtgtggctgtacacgatgctctgtgtgttgaagtgctgaagacctcggctgggctgggactgagtctggatgggggaaaatcatcggtgacgggagatgggcccttggtcattaaaagagtgtacaaaggtggtgcggctgaacaagctggaataatagaagctggagatgaaattcttgctattaatgggaaacctctggttgggctcatgcactttgatgcctggaatattatgaagtctgtcccagaaggacctgtgcagttattaattagaaagcataggaattcttcatgaattttaacaagaatcattttctcagttctcttctttctttagcaaatcagagtgacttctttaaaccacaggttgttgaaatggccaacactggtacagacacggactataaaaatctccaagcttgtgcttacacatgaagcctgacttaactgtatgtgcaacagcaatgaaattaactccagaagccttccacctgcgtcacccaggccgggagggttccttcgttccagtgcctgtcccctacctttatgttatgtttactgatggggatacaagatgtgacacacccttctttatttgaaacaaacaaacatttagctagacctttgcttccttcttgccagctctcccaacatacccaatcctggtgatcagggaactaaaagtctgagggggacacaaatgtcacacctaagaggacaatcaatcattttgtatgattttgtaagtaagtaaatgacagaatgcttttaggcacattcaatggaaggaggagatgtaggtctgtatatgttaccctgaaaagagaataagacttacttaaaaaaatgaattatgacctgttaggctgagctcaggaattgtccaaaaaggaaaaagcaaaataattaattgagagtattttttagtgagtgtaatgtataatgtacgtatgcaaagttcaactcaataggttattgatcaccatgaagtattgatcattttctatctcaaaagtgtaagccataaggctgttttacagaatagcacttctgataagctgtattaaatagccatgagcttcactgcttagagggagcagaaaggtcaacatctaaaagcaccttacaactagtttttgaacctgtcttgataagtgcttgaattcaagactggtcagtacaagagcagacaaaaatatcacaagtcagtcactgggtttccatttctgaattttatgcactccaaccatgaatttaaactaaatttttagaaatcaagtatctttctaagtgtccttggatttatagacaatgtatgtacaatccaaatagaggagcttaatggaatccttttaggagactggttggtttttttccctctttcccaacatgtttaagaaatgtaacattctaagtattggatctcttttcttgacctagtataatgacaactgcagtgacttaagtttttgctgttttcgttttcccgctttgcaatttcctccttttgccaaaaatgttttcctacagaagactgtcgtgactcacgctacttgggaaactcactctggccactcctcctctggtggcatgagctgcttcccagtagctattccgattggatattccgttcgtcgtcacatagctggcttttctctcctcatgatgtaccttattttcttaggtaaataattccaaactctcatcgggtcataaagaggaggagaaacagggtgagtcaaggtaaaggagcagaaatgtagttacaagccaggtcgtcttcagtggcacaaaccaacccgttgagccctgacaacatgagtggagagtgcatttgccatacctgtgtgcatgacactaagattttatgttggagatacttctttaaataacctacagcttgggtctatggctgtgacccccagattcatggaggggctttagccatcagctttgtacatcatcatttttctgaatgaccaatcccactaaacatctttgaagtcggcctagagaggtccttcagatgagagagaaatagctggcttgtctgagtccagatttctcatcaactggcaatacaaaggaaaatatggtacaggagttagttagaaaggtcttattgattttacttctacttttcactacagttacaggtagaatactgtaggaagtcagtgcaaggtgcatgcttgattgatagatattgattgtttttcagtctctggggtcagttttgtggtttctgctttcttgcctaaatcaaagactatttcaagtcaacaacactgaaaactgcttttcgcctccactcttacagctgtgcctaataataattaattaataaacgcacagccctatgtgaacagacaggaatttcttgtgcaatgtggagcaaatggaatggtctccttccgcaagtctttttaatcctcatatctggagtacaagggtagacctctggcttaccacatacactatgctaaagtcatcagccactgctactacatcttgccagaaggtttccctcgccaacaaacagttgaaatttaagggaagaagcaaaagctaaactgtctttgaccctaagatagatagaaagctatttatttgtcttcagtgttcaaggcatgactagtatttctaattagcctaataaattcccacactttctgaagtgaacactaatggtattgtcctactaaaactgtcattgtttctttttttttaactggtcagtcattcacaataagctatgagggtaaataaatatgtgttataacaagtaaaccgtagttgcaagaatataccatgaagattaaagtaggctgggtttcatttccatcttcccacacatctcattgaatttgatggttgacttaattggcaccataactttgtatgatattatacattaacctttatttatgtaaagtaaaatgccttatatattaaagagtaagtgcaataatatgaaatagcctgtacattttaaaaatgttgtcaccaagttatataaatccacatctctgtaaacaaccttttttaagtaattttaaaaaaaataaacactctgcttactacttg

SEQ ID NO: 3335 - DNA, 6452 bp, Homo sapiens
ggaagaaagtaaaaactcaaacaagctcatttgatatacaaaaagcagaatggcttcgaaaatataatcccgagcagctccttcaagatgaaggctacaaaaaacatataaaacaccactgtaataaggttttgcttcgtgtgagaatgctgtattatctaaagcaagaagttattggaaatgagtgtcagaaagtatttgatggagttgatgcaagtgacattgatgtttgggtaccagaaccagaccactcagaagttcctgctgagtggtgggattttgatgctgataagtcactccttattggagtttttaaacatggatatgaaaaatataacactattcgagcagacccagcattatgcttcttggaaagagtgggaaaacctgatgagaaagcagttgctgctgaacagagagcgaatgattatatggatggggatgtggaagatccagaatacaaacctgccccagccatctttaaagatgatatagaggatgatgtttcctcaccaggagatcttgttatagcagatggagatggtcaactgatggagggtgataaagtatattggcctactcaatcagctttaaccacacgtttgaggcgtctcatcactgcataccagcgtactaataaaaacagacaaattcaacagatacaaccgactttctcggtgcctaccagtgtaatgcagcctatttatgaggaagccactcttaatcctaaaatggcagccaagatagaaagacagcaaagatggacaagaagagaagaagctgacttttatagggttgtatctacatttggagtggtttttgaccctgacagaggccaatttgattggacaaaatttagagctatggctaggctacataagaaaactgatgatagtttggaaaaatatttgtacgcattcatgtccatgtgtcggagggtttgtcgtcttccttccaaagaagaattggtggatccaaatatttttatccagcccatcacagaagaacgtgcttctaggactttgtatcgcattgaacttctaaggaaagtacgggaacaggcccttcgacatccacagttgtttgaacgcttgaagctttgccatccaaatccagatttaccagtctggtgggaatgtggccctcatgatagggatttgcttattggtgctgccaaacacggggtgagccgaacagactatcacattcttcgtgatcctgaactctcatttatggcagctcagaggaactacagtcaaagtaagatggctcattcaaggacttctaccccacttctacagcaatatcaagtagcactttctgcttctcctcttacctctctacctaggctcctagatgctaaaggtattattctagaggagatgaaagttaaaagtgaaaaccttaaagaggagcctcagtcttctgaagaagaatctatgtcttctgtggaaaccaggacactgataaaatctgagcctgtaagtccaaagaatggtgttttaccacaggctactggagaccagaaatctggtggaaaatgtgaaacagacagacgcatggttgcagccagaacagaacccctaactccaaacccagcttctaagaaaccaagagtccacaaaaggggatcagaatctagttctgattctgactcagattctgagagatcatcttgttcttccagatcatcttcttcctcatcatcctcttcttgctcccactctcgatcaggctctagttcttcttcatcttcatcttgttcttcagcatcttcttcatcctcttcctccacctcttcctcctcctcctcctcttcatcttcatcagaagaaagtgacagtgatgaagaagaagcccaaaaacgagaaagtactactcacatgaaagcctatgatgaagaaagcgtcgcgtcactgagcactacccaggatgagactcaggatagttttcagatgaacaatgggacaccagagtctgcttatatcttacaaggtggatatatgctggcagcctcgtattggccaaaggatcgtgtgatgatcaataggttggacagtatttgtcaaacagttctgaaaggaaagtggccttcagctagaagaagttatgatgctaacacagtggcttctttctataccacaaaactgctggacagccctggagcagctacagaatacagcgagcccagtgtacccactcccccaggtgccggtgttaaagaagaacatgatcagtcaacacagatgtcaaaggaaggtggtttgaagttgacatttcagaagcaagggcttgctcagaaaagaccatttgatggtgaagacggtgctctggggcagcagcagtacctcactcggcttcgagagcttcaaagtgcatcagagaccagcctcgtcaatttcccaaaatccataccagtatcaggtacttccattcaaccaacccttggtgccaatggtgtgatattagacaaccagcctatagtcaaaaaaaggcgaggaaggaggaagaatgtagaaggtgttgacatcttcttttttaacagaaataaaccacctaatcatgtttctttaggcttaacctcctcacagatttccacagggataaatccagcactatcctatactcaacctcaaggaattcctgatacagaaagtccagttccagttattaatcttaaagatggaacgagacttgcaggagatgatgcaccaaagagaaaggatttggaaaaatggcttaaggagcacccgggttatgtggaagatttgggagcttttattcctagaatgcagcttcatgagggaagacccaaacaaaaaagacaccgttgcagaaaccccaataaactagatgtgaatagtctcactggagaagaacgtgttcaactgattaacagaagaaatgctagaaaggttggaggtgcatttgctccccctttgaaagatttatgtagattcctaaaagaaaattcagaatatggagtagctcctgaatggggagatgttgttaagcaatctggatttcttccagaaagcatgtatgaacgtattctcactggtcccgttgtgagagaggaagtaagcaggcgggggagacggcctaaaagtggaattgcaaaggccacagcagcagcagctgctgcatctgccaccagtgtttcaggcaatcctttgttagccaatggactacttccaggtgtggatctcacaactcttcaggccttacaacaaaacctacaaaacttgcagtcactgcaagtaactgctgggttgatgggaatgcctaccggccttccttctggaggagaagctaaaaacatggctgctatgttccccatgctgctgtcaggaatggctggattaccaaatctgttgggcatgggaggactcctgacaaagcctacggaatctgggacagaagacaaaaagggaagtgactctaaggagtcagaaggaaaaacagaaaggacagagagccaaagttcagagaatggtggagaaaactctgtgtcaagttctccttccgcatcctctactgctgcattaaatacagctgcagctgccaacccattagctcttaacccactattactatctaatatactttatccagggatgcttctcactccaggccttaatcttcatattccaactttgtcccagtccaatacttttgatgtacaaaacaaaaacagtgacttaggctcgtctaagtctgtagaagtaaaagaagaagattccagaattaaagatcaggaagacaaaggaggaactgaaccaagtcctctcaatgaaaacagcacagatgagggttcagagaaagctgatgcttcatctggatctgatagtacatcgtcgtcatctgaggattcagattctagtaatgaagactgattcccagactctgcacttaaaatatgaactgattttggattttttctttaataattaattgtaaataccccagtgttgagtgcatcaataacttactgaccgaacatttcagttatttgtttagaagtgcaaactgctttcagagactttttgcatgtaatatttcttaagattcataagtttctgaactcgtatgtactatcaaatacataaaggtgtaaaattacaacaaaaggcattataattttgttgggggttaattttatgaaaattatgctcaataagagttgtatatttaatatatttgcagtgaacacagaatactttatgcatattactgatttaatttgaatatagttttacagcctccttgacacctataatttacagatcaaaactcagcaataatttgggcagctaatgaatgtcatgaaagctgtagaatctacatcaccatccattgctttaattacatgaaaatgctctagtgttgtgatgcactgctgatgtttccaattcaggtacaagtatgttttaaagaagaaataagtttcccaatcagccaatttaactggctacctgttacctcagctgagttagtttaggaagtttacattcgtttctaattctatacttgttttcaggggttttttaaacacatcctatatatcatgtcaatctggcaagaaatatgacttgctttttgctgagcttaattcagatatcagtaaaattaagtcataaaataatcatgtgtcatgtgactttggcaccctatagacatacttagttttaacttttcaaagtttggcctcctattagaaataatcatgtctcagatgagtaatgtctgtttccagggttcagaaaaggcaaactcatgaaatgccactgaaaagaactttcaacacagcatacttcatgtaaaagaaattgtttgtttgctttctttgtgtagatttctatttgtgttttatgtcatggaaatattccagaattaacagataatagtggtaaagtaatatgcagatagtctaaattcattttgagtttctaggtgtaagcagactaaatgttgcccagaatcagtgttgggttatcagtttatattaaatatactgagttgcccgttttgaaaatgcactttgaataatctcaaaaagatgtacaagttatacctgtaaaccacaaaagtgaagcctgaggcttctgttcaatttcatagactcctttaccatgtaaaatttgtctgatatttgatttgtgatacaatttctcctgctaaagctgctattattctgacaaggtagaggtccaggttcacctttatatatatttaaaacaattagtactgaattggacataaaaatattgacattctaaggagagatatatgttagcatttttctggtactcaaataagttagtagtaaagtctgcaagggcataaatttagggggaaaaagtgtcccagttctctcctacagaaaaaatactttcagtatgttttgataaaactgttgctttgtcatgagttagtcaattgtatcaggttttccaagacctttaccagtaaattatgtttctgtatgtaaaataaccccttattagagagacagtgttatatgtatttacaaaattatataagttccattgggattgtattgattttgtattttcccaaaatagtactttgaattgatagtcctttatgcaatgtcttagcaatagtctctataatgcccatccaggagaagtgggtagtaattcttcatcatgaaaatgatatattacatatttagtatcttccctttgcagtattgcacttttgtttaactagaatacacctatgagatagccaaagtttcaaacacagttatcttagtttaccggtggagtatttcaacaccaaccacatttcccttcctccctctaattctacccacatgatctttattccttcctttcgccaattaaaaaaaaaaaaaaggaaaaaaaatctgtagatcttgtcactaaaatctaatttatatcaaatttatgagagaaagtattttcctaattatggtcaaataaatttggttaacatcctagtgattctctttctatataataaggcaattacagttttcaaagcattaagtctaacataactttaaacattctcttaggtttcaagacacttctatttaatattcattggggaaaagttgtccagctatcagctaagaaaacacatgcaaatatggttgtgtaaagttaagggttataaggaaaaaaaaatcagtagaattacataatactaaagttgcagttgaaagaatatccaagtatgtgttggtagttactaaaagaattatagctgttattgccttgtatttatagcccttgtttcaggttttatgattcaagtcttagtccaatctttcttttggacatttgcaatatttaccagttgtgttttgtgtagtctgaatttgctttctgtagttgagcaaacgtcttaaaaagtcatttgtaatttattaaattactttctatgatgttctatagagc

SEQ ID NO: 3336 - DNA, 5432 bp, Homo sapiens
gcaagaccaaggtggctgtgctggagatcctgggtgctgtgtgcctcgtgcctggtggccacaagaaggtgctgcaggccatgctgcactaccaggtgtatgcagcagagcgaacccgcttccagaccctgctgaacgagctagaccgaagtctgggccggtaccgggatgaagtgaatctgaaaacagccatcatgtccttcatcaatgctgtcctcaatgctggagctggagaggataatctggagttccgcctacatctacggtatgaattcctgatgctgggtatacagcctgtgattgacaagctccggcaacatgaaaatgccatcctggacaaacatttagacttcttcgagatggtgcggaatgaggatgacctggagctagccaggaggtttgacatggtccacatcgacaccaagagtgcttcccagatgtttgagttgatccacaagaagctgaagtacacggaggcctacccctgcctgctctctgtgctgcaccactgcctgcagatgccctacaaacggaacggtggctacttccagcagtggcagctcctggaccgcatcctccagcagattgtcctccaggatgagcggggtgtggaccctgacctggctcccttggagaacttcaatgtcaagaacatcgtcaacatgctcatcaacgagaatgaagtgaaacagtggcgagaccaggcagagaagttccggaaagaacacatggagcttgtgagccgtctggagaggaaggagcgggaatgcgagacaaagacattggagaaggaagagatgatgcggacgctgaacaaaatgaaggacaagctggcccgggagtcccaggagctgcgccaggctcggggacaagtggcagagctggtagcccagctcagtgaactctcaacaggccctgtatcttccccaccaccccctgggggcccactcaccttgtcttcctcaatgacaaccaatgacctgcctccaccccctcctcctctgccctttgcctgttgtccccctcccccaccaccaccccttcctcccgggggacccccgactcccccaggtgccccaccttgcctcggcatgggcctgcccctccctcaggacccctaccccagcagtgacgtcccactcaggaaaaagcgtgtcccccagccttctcacccactgaagtccttcaactgggtgaagctgaatgaggagcgtgtccctggcaccgtatggaatgagattgatgacatgcaggtatttcggatcctggacctagaggattttgaaaaaatgttttcagcctaccagaggcaccaggagctgataactaatccttctcagcagaaagagctgggctccactgaagacatatacctggcttcccgcaaggtcaaagagctgtcggtcattgatggccggagggcccaaaactgcatcatccttctttccaagttgaagctttctaacgaggagatccggcaggccatcttgaagatggatgagcaggaggaccttgctaaggacatgctggagcagctcctcaagttcatcccagagaagagtgacattgacctcctggaggagcacaagcatgaaattgagcggatggcccgtgctgaccgcttcctctatgaaatgagcaggattgaccactaccagcagcgactgcaagccctcttcttcaagaagaaattccaggagcggctggctgaggcaaagcccaaagtggaagccatcctgttggcctcccgggagctggtccgcagcaagcgtcttagacagatgctagaggtcatcctagccataggcaacttcatgaacaaagggcagcgtgggggcgcctacgggttccgggtggccagcctcaacaagatcgctgacaccaagtccagcatcgacagaaacatctctctgctccattacctgatcatgatcctggagaagcattttcctgatattctaaacatgccttcagagctgcaacatcttccagaagccgccaaagtcaacctagcagaactggagaaggaggtgggcaacctcaggaggggcctgagagcggtggaggtggagctggagtatcagaggcgccaggtacgggagcccagtgacaagtttgtccctgtcatgagcgacttcatcacggtgtccagcttcagcttctccgagctggaggaccagctaaatgaggccagggacaagttcgccaaggccttgatgcacttcggggagcatgacagcaagatgcagccagacgaattctttggcatctttgataccttcttgcaggccttctcagaggcccggcaggatctagaggccatgaggaggaggaaggaggaggaggagcggcgggcgcgcatggaagccatgctgaaggagcagagggaacgtgagcggtggcagcggcagcggaaggtcctggctgcaggcagctcgctggaggagggaggagagttcgatgacctggtgtcggccctgcgctctggggaggtcttcgacaaggacttatgcaagctcaagcgcagccgcaagcgatcagggagccaggccctggaagttacccgggagcgggcaataaaccggctaaattattgacctggggaactagccacacaggaggccgggagacagggactggtgagaatggggctgagtggaggaggtggtgatatttaaaccatttggtgcttggtttagagccttgggctgggtcctgggatggggggctgtgtgtggctggaccaggtgtctccccacgcttaccttaaggggctcctcttatctccccttcacatgattccttctgtgccctggccccaggtattattctgaggctgccttggatggcctcaggccaggtaaccccaggctgaaggggccctgctccccatcccctaccatgggcacccatgtgctggcacagaacagttccagatctagactggagaggtccacagccttgtccagagttcctgtgtagcacggggagcaatgatggagggagcccctgagagggaatctggtgagggaatccagactcccttctctcaaggggaggctcaacagaacattgacctgggggcaaactttcctcttgaatgggaacagaggaggcattatatattctagttagatcagctctggtaggttccagagaacagtcaatgttggaaggatgatgcagggaccaaagccatcaggacagagtagcagtgtctgtttcccatgtcacaagtcctctggcctctccctgcatgtcttaagtatctttcccttccttctctaccctcacctccatcctgtctactaatccacagtcctagaagactcaccttgggtttccacagctatggctcactaccaggtgcttgatgaatctggcgaggggctcaagacagacctcatgcatcaccacacctcatgccttttgggcatctcccatgtccccatctcctggacacctggccattgttgtgaagccagacagtgacctcaaatgttgccttggagtcccctacagcccctcagcagagggcagcacttgaatgcttagctccatcccatagttctctacttcatataaattgctcaggccctcccaccccttctctaacactagcttcaaggcagaagccacagcagcctctgtccagcctgcaggtggccacttggaaccatgtgtccactggcgttggggagttggttcctgagaggtctgagggccagagctgccctctacattaacatgctgtctctaagggtggcccctcctctcaggcgttcagatggtgcgaacagcagagcaggcaagggaaactggggagatggggatggaggaggaaggctgatatcctctggggagcacatcacctgaaggtgccaaggaggaaggctgagaggggggccaccccatttctggtacccaatttggttcttcagcccaacttgcaaggggttccttctggtcctcccatccactgccaccttccattttgtccatctcatgctggccttggtggatgggatggctgtatctagacaaaatttttctaaaactccatcaaggctcttattcaataccacgttccgagttggcctttcatcttctttgagactggccctgcctaacctctaccatcaatgagctcttggcccttctgcccttccctgtgtttctcactttccaacctaatccctggctcagggttattgccagtggagactggtgagctgggcctactctcagctgcctatcttctgcctttcacttgcatccaactcctggggctgggaccgtagtagctgcggtgggggagaaacacagggtcggtgagcccagcatgtgcgttggtttgagggggcgggcggtgtgtgtgtgttctggtgggagggatctgagcaagtgcaagcctggctgacacaggtgtgaagaggccatcctggaacccaggtgagggcaagatgaaggcttccaggcagaacagctgcagagagtttggctatatgcatctgcagccccaagagctcccactgcaagacaagtgttggggaagatgggaggttgtgggtgaggcctctaaaggtcctctcccaaactgaccaggctgatgtcaacctaaccccctcaggggcagggaacaggggagggctccacaagcgtgtctggcattcccacccaccatggaagactggatacgcacctggaaacaaaaggactatggaagctgttcaagatacatttgatcttcagaaaagcagaatttggttcaactgttgacagaggacacaaatacgttgttccagagctcagccttctcactctaaaagaaagatatttttctatttattttctacatctggccagtggctctggtgctagatgccactgtagccagatctccaacagtgccttggaccatggactcatactcaactgagtaagaaggggctggtgcccagtcggggtggctgagctggtccttaataggttgtttcttggtcttgctttcttcatgccctccccactgctcctgccacctttagataagtttctctagctaattttgtggccaatgtaaaattcgtcatcaacctaacaaacacaaccttctcagcagcatttctcccctgtgatggaaataaataaagtgtttagggcagtgggaggagaaaattctccaggtgaatggggaagggtctgttccagcctctccctactcccatcccatttccaccaactggggaactgtgactatctatctcccccgacttctaccagggatgccttcaagccaaggctgttctcaccagctgcctcagatgacaaatgaggctaatggacataatctacagtgtcctttttcacttgcaccttttttataagaatatattgtaatactaaaaaatattaaattcataccatccctaccc

SEQ ID NO: 3337 - DNA, 482 bp, Homo sapiens
aaaatatctcattaaaaagcccataaataataggggagaagaaagccttaggtatcaattccaaaacagtgattgaaatttcccaaaataattatggcttctgtcatctccagagataatctggcttggtttaccccataatctaatttcagaaaagaaagctttattttaacactcatctgaatcaacattaaagccttttctctcaaagcgtttattgagaaactcaaatgaatatactttttgaattactgtcatcaaaagtgtacggcttcctgtgctgcttgtgtcaaatggaacctgccctctaaagcactttctttcctttacttgcgtggtttcatgtaagctgtgctgtttagaacaacatctcagactttacaaagaatgacaagaaggcaattgcactttttagggatatcgccaagcagtttctgttttctaaaggccaaaatacagagtgtgtgtcatttttattagat

SEQ ID NO: 3338 - DNA, 429 bp, Homo sapiens
gttcagagagattttcattgggtgcattctctctgcttcgtgtgtgacaagttatcttggctgctgagaaagagtgccctgccccacaccggcagacctttccttcacctcatcagtatgattcagtttctcttatcaattggactctcccaggttccacagaacagtaatattttttgacaataggtacaatagaaggtcttctgtcatttaacctggtaaaggcagggctggagggggaaaataaatcattaagcctttgagtaacggcagaatatatggctgtagatccatttttaatggttcatttcctttatggtcatataactgcacagctgaagatgaaaggggaaaataaatgaaaattttacttttcgatgccaatgatacattgcactaacctgatgggagaggttatccaaagtactg

SEQ ID NO: 3339 - DNA, 379 bp, Homo sapiens
  misc_feature (1)..(379): n=a,t,g or c
ttagcagttcanatagtttattcagcaatataacaggagagaacctccattgtaagagacataaggcagatacagggtgcatctctggggtacattcttcatacagactaacaaataacttcaggtttcacaacatgtagcaagtatgatttgttgcacaccaacagccattcattcctcacgttttccttgctaaaagagccctggtcaggcacggtggctatgctgtaatcccagcactgtcggaggtcagggcaggtggatcatctgaggtcaggagttcaagaccagcctggggcaacatggtgaaaccccgtctctactaaaaacacaaaattttgccagacatggtgggcggggcacctgttaattccccact

SEQ ID NO: 3340 - DNA, 411 bp, Homo sapiens; identical to SEQ ID NO: 677
  misc_feature (1)..(411): n=a,t,g or c

SEQ ID NO: 3341 - DNA, 458 bp, Homo sapiens
  misc_feature (1)..(458): n=a,t,g or c
ggagtttcaccatgttggccaggctggtctcaaactcctgacctcaggtgatccacctgcctcagcctcccaaagtgctgggattacaggcatgagtcattgctcccagccattagaaagattgttaatcctatgaactcccttttgtaggagagaaagggccaatctgtaggggtagccctgtccaggtaaagttgttttcagcctcatgtctactgttaggtgagggagtcacagccagacagagagtattgctggagggtgagagaattgtggagaccaactaccacatagcaagagcccagctcttgggagcattgagatgtaagctcagggttacacagttccaaatcttggggaaggggctttttcagacagactgtttgctttctgctgagattaaggaattgcatcantctgccagagtattgactttttaacagattattaaataaagg

SEQ ID NO: 3342 - DNA, 5433 bp, Homo sapiens; identical to SEQ ID NO: 144

SEQ ID NO: 3343 - DNA, 1486 bp, Homo sapiens; identical to SEQ ID NO: 703

SEQ ID NO: 3344 - DNA, 1421 bp, Homo sapiens
ggcatgcggtgggccctactggtgcttctagctttcctgtctcctgccagtcagaaatcttccaacttggaagggagaacgaagtcagtcaccaggcagactgggtcatctgctgaaatcacttgcgatcttactgtaacaaataccttctacatccactggtacctacaccaggaggggaaggccccacagcgtcttctgtactatgacgtctccactgcaagggatgtgttggaatcaggactcagtccaggaaagtattatactcatacacccaggaggtggagctggatattgagactgcaaaatctaattgaaaatgattctggggtctattactgtgccacctgggacaggcaaaaattattataagaaactctttggcagtggaacaacacttgttgtcacagataaacaacttgatgcagatgtttcccccaagcccactatttttcttccttcaattgctgaaacaaaactccagaaggctggaacatacctttgtcttcttgagaaatttttcccagatattattaagatacattggcaagaaaagaagagcaacacgattctgggatcccaggaggggaacaccatgaagactaacgacacatacatgaaatttagctggttaacggtgccagaagagtcactggacaaagaacacagatgtatcgtcagacatgagaataataaaaacggaattgatcaagaaattatctttcctccaataaagacagatgtcaccacagtggatcccaaagacagttattcaaaagatgcaaatgatgtcatcacaatggatcccaaagacaattggtcaaaagatgcaaatgatacactactgctgcagctcacaaacacctctgcatattacatgtacctcctcctgctcctcaagagtgtggtctattttgccatcatcacctgctgtctgcttggaagaacggctttctgctgcaatggagagaaatcataacagacggtggcacaaggaggccatcttttcctcatcggttattgtccctagaagcgtcttctgaggatctagttgggctttctttctgggtttgggccatttcagttctcatgtgtgtactattctatcattattgtataatggttttcaaaccagtgggcacacagagaacctcagtctgtaataacaatgaggaatagccatggcgatctccagcaccaatctctccatgttttccacagctcctccagccaacccaaatagcgcctgctatagtgtagacagcctgcggcttctagccttgtccctctcttagtgttctttaatcagataactgcctggaagcctttcattttacacgccctgaagcagtcttctttgctagttgaattatgtggtgtgtttttccgtaataagcaaaataaatttaaaaaaatgaaaa

SEQ ID NO: 3345 - DNA, 2907 bp, Homo sapiens
ggaaccatggagctcagcgtcctcctcttccttgcactcctcacaggcctcttgctactcctggttcagcgtcaccctaactcccatggcaccctcccaccagggccccgccctctgccccttttggggaaccttctgcagatggacagaagaggcctactcaaatcctttctgaggttccgagagaaatatggggacgtcttcacggtacacctgggaccgaggcccgtggtcatgctgtgtggagtagaggccatacgggaggccctggtggacaacgctgaggccttctctggccggggaaaaatcgtcatcatggacccagtctaccagggatatggcatgctctttgccaatggaaaccgctggaaggtgcttcggcgattctctgtgaccaccatgagggacttcgggatgggaaagcggagtgtggaggagcggattcaggacgaggctcagtgtctgatagaggaacttcggaaatccaagggagccctcgtggaccccaccttcctcttccattccattaccgccaacatcatctgctccatcatctttggaaaacgcttccactaccaagatcaagagttcctgaagacgctgaacttgttctgccagagtttcttactcatcagctctatatccagccagctgtttgagctcttctctggcttcttgaaatactttcctggggcacacaggcaagtttacaaaaacctacaggaaatcaatgcttacattggccacagtgtggagaagcaccgtgaaaccctggaccccagcgcccccagggacctcatcgacacctacctgctccacatggaaaaagagaaatccaacccacacagtgaattcagccaccagaacctcatcatcaacacgctctcgctcttctttgctggcactgagaccaccagcaccactctccgctacggcttcctgctcatgctcaaataccctcatgtcgcagagagagtctacaaggagattgaacaggtggttggcccacatcgccctccagcgcttgatgaccgagccaaaatgccatacacagaggcagtcatccgtgagattcagagatttgctgaccttctccccatgggtgtgccccacattgtcacccaacacaccagcttctgagggtacaccatccccaaggacacggaagtatttctcatcctgagcactgctctccgtgacccacactactttgaaaaaccagacgccttcaatcctgaccactttctggatgccaatggggcactgaaaaagaatgaagcttttatccccttctccttagggaagcggatttgtcttggtgaaggcattgcccgtgcggaattgttcctcttcttcaccaccatcctccagaacttctccgtggccagccccgtggctcctgaagacatcgatctgacaccccaggagtgtggtgtgggcaaaatacccccaacataccagatctgcttcctgccccgctgaaggggctgagggaagggggtcaaaggattccagggtcattcagtgtccccacctctgtagataatggctctgactccctgcaacttcctgcctctgagagacctgctgcaagccagcttccttcccttccatggcaccagttgtctgaggtcgcagtgcaaatgagtggaggagtgagattattgaaaattataatatacaaaattatatatatatattttgagacagagtctcactcagttgcccaggctggagtgcagtggcgtgatctcggctcactgcaacctccacccccggggttcaagaaattctcctgcctcagcctccctagtagctgggattacaggtgtgtgctaccatgcctggctaatttttgtatttttagtagagatggggtttcaccgtgttggccaggctgatctcaaactcctgaactcaagtgattcacccaccttagcctcccaaagtgctgggattacaggtgtgagtcaccatgcccggccatgtatatatataattttaaaaattaagatgaaattcacataaaataaaattagccattttaaagtgtacaatttagtggtgtgtggttcattcacaaagctgtacaaccaccaccatctagttccaaacattttctttttttctgagacggagtctcactctgtcacccaggttcgagttcagtggtcttgaactcctgatgtcaggtgattctcctagttccaaatgttttcattatctctcccccaacaaaacccatacctatcaagctgtcactccccataccccattctctttttcatctcagcccctgtcaatctggtttttgtccttatggacttaccaattctgaatatttcctataaacagaatcacacaatatttgattttttttttaaaactaagccttgctctgtctcccaggctggagtgctgtggcgtgattttggttcactgcaacctccgccttccaagttcaagagattctcctgcctcagcttccaagtagctgggattacaggcatgtggtaccacgcctggctaattttcttgtatttttagtagggacatgttggccaggctggttgtgagctcctggcctcaggtgatccacacgcctcagtgtcccagagtgctgatattacaggcgtaatatgtgatcttttgtgtctggttcctttcacgttgaacgctatttttgaggttcgtgcctgttgtagaccacagtcacacactgctgtagtcttcccccatcctcattcccagctgcctcctcctactgtttccctctatcaaaaagcctccttggcgcaggttccctgagctgtgggattctgcactggtgctttggattccctgatatgttccttcaaatccactgagaattaaataaacatcgctaaagcctgacctccccacgtc

SEQ ID NO: 3346 - DNA, 6314 bp, Homo sapiens
gtcggcgaggagggtccggccggagttgaaggattgaactttccggctcagtcgcggcggctgcctggtcctcagcagtgcagccccggcgcggagcagggagcctcggcccgcgcccggcgccctcgccctcgccctcgacccgcagccatggtgcccggggtgcccggcgcggtcctgaccctctgcctctggctggcggcctccagcggctgcctggcggccggccccggcgcggctgctgcgcggcggctggacgagtcgctgtctgccgggagcgtccagcgcgctccgtgcgcctccaggtgcctgagcctgcagatcactcgcatctccgccttcttccagcacttccagaacaatggttccctggtttggtgccagaatcacaagcaatgttctaagtgcctggagccctgcaaggaatcaggggacctgaggaaacaccagtgccaaagcttttgtgagcctctcttccccaagaagagctacgaatgcttgaccagctgtgagttcctcaaatacatcctgttggtgaagcagggggactgtccggctcctgagaaagccagtggatttgcggccgcctgtgttgaaagctgcgaagttgacaatgagtgctctggggtgaagaaatgttgttcgaatgggtgtggacacacctgtcaagtacccaagactctgtacaaaggtgtccccctgaagcccagaaaagagttacgatttacagaactgcagtctggacagctggaggttaagtggtcctcgaaattcaatatttctattgagcctgtgatctatgtggtacaaagaagatggaattatggaatccatcctagcgaagatgacgccactcactggcagacagtggcccagaccacagacgagcgagttcaactgactgacataagacccagccgatggtaccagtttcgagtggctgctgtgaatgtgcatggaactcgaggcttcactgcccccagcaaacacttccgttcttccaaagatccatctgccccaccagcaccggctaacctccggctggccaactccaccgtcaacagtgatgggagtgtgaccgtcactatagtttgggatctccccgaggagccggacatccctgtgcatcattacaaggtcttttggagctggatggtcagcagtaagtctcttgtcccaacaaagaagaagcggagaaagactacggatgggtttcaaaattctgtgatcctggagaaactccagccagactgtgactatgttgtggaattgcaagccataacgtactggggacagacacggctgaagagtgcaaaggtgtcccttcacttcacatcgacacatgcaaccaacaacaaagaacagcttgtgaaaactagaaaaggtggaattcaaacacaactcccttttcaaagacgacgacccactcgcccgctggaagtcggagctcccttctatcaggatggccaactgcaagttaaagtctactggaagaagacagaagatcccactgtcaaccgatatcatgtgcggtggtttcctgaagcgtgtgcccacaacagaacaaccggatcagaggcatcatctggcatgacccacgaaaattacataattcttcaagatctgtcattttcctgcaagtataaggtgactgtccaaccaatacggccaaaaagtcactccaaggcagaagctgttttcttcactactccaccatgctctgctcttaaggggaagagccacaagcctattggctgcctgggcgaagcaggtcatgttctttctaaggtgctagctaagcctgagaacctttctgcttcattcatcgtccaggatgtgaacatcaccggtcacttttcttggaagatggccaaggccaatctctatcagcccatgactgggtttcaagtgacttgggctgaggtcactacggaaagcagacagaacagcctacccaacagcattatttcacagtcccagattctgccttccgatcattatgtcctaacagtgcccaatctgagaccatctactctttaccgactggaagtgcaagtgctgaccccaggaggggaggggccggccaccatcaagacgttccggacgccggagctcccaccctcttcagcacacagatctcatcttaagcatcgtcatccacatcattacaagccttctccagaaagatactaaactgttcaaaaagattttgtgaaattgcacagatgtgtaagcttgttgaacttcggccacgagacatgcacacttccagaggcagtgggaactgctcagaggcccggactctcctatgtgactttagtgcaggaagaacttctgtcaatcatggacgcatctggagacaagtgagaaacagtagattggtgaagacagacaccagttccctacaagcatggagaaaatgaagaataggcctgtttaatgctaaattttgttttcatgtatggtgtcgctcatttctattgaattacaacagaactcagttttccctgaatttggagcaccaaactccgccccaaaaaggagagtaacaaatacacaattcacacataacactaagcgtaaatctaatcaataaaatatatttttgactaaattattgattcgatatgaaaaatcaactaagattacacagctttgtttttttgaatctttcctaagatcatttttatcctaggtgatttttaaatgaaaatgtgtaatctaaaatataccagcgaatttaaatctaaaaatgctcctactttaagtaccttgtgctgctctttatgcaaaggtaaatcaaagttccctctataaattatgatttacaaaagacacccaagccagaggaactcaatgaaataagctgctaatcagattttaccttggagaaatgaaaattatttcttggggatgccttttaatatttgatcctattatgtgagagattttcctgatatgttatcttatttatattttcccttattttcctcaatgcagataatagcttttggtgcacttttgtttcaccatctgaaaattcacaaaacttcttgcttcaaatgaaaaaatcccaactattgagcatgtttaaatctttgcagagatttgccttttcttaatcaaagaaaggtctttgtgtgctagaatattattggtaatgttttaaaaattcctttgattgatagagaaggacagttatttgcatttaattcacccatatgctttcaaatctagtatatcttactttttggaaatgttttatgctacaaattagtgccttgtagcatgaacttaagtcaaaacgtgttatcaatatagagtgttgcagtgtatattgtaacaacctaaaacgcagagaagtttaatttaatactgttttttttcttgaaggaatactcacatacatggtttgaaatgtgcatagatatgcatgtctatataattataaatgcatgtgtatatatatgcaaatatatgtacatatacatgtatatacacacagacacatgcatatacatgaatataccttgagcatgaatccctggagaaatcgttttcgtaggctcaccaatggtgagtaaagatacagctcttttaaaggtcataaggataatatattttccccatcaatgctgattctgagaaaagagcaatttatcaaaattaaacactgtaaaagaaaggtgtccatatgtctttacctacctaagtaaaacaggaagaaaatcagtaacattatccttaggttttgacaatggtacttgcttcttgttgttttattgtttcctgaattcatgcagatgcctggccattcctgggaagagtggataactcagaagtcactgtactccacagagcctcactgcagtgtctaaaggtagatgcaaattaaaatgcagggaaaataacttttctgatgttgatgcatgtctttgggaaacacatttataaacatggatacctgataatagatattgaaacccatttcctgtgtgttaaaatatttaaaaagtggatattccaggaatgttttgcagctttgtacaagtaacataaattggacacctcagaatgaaagttcatgttggttctgaatggttcactgcagctcctgtcacaagctgggatggatttatcacattgagttatgaaattacctggttctaagaatttttgagtggcaaaaatagaaaacaatcttcatttgaaaacatccctaagcttgaataaatggataccatagatagcttctcttttttattctggtgtcattaccagcatctgaatttcaagttcttaaaatttcaaaaattaaaatttttcattattagctatccatttatcttttacatgaacttgtcatgaacaaattcaaatgtttatgccagcaaatttttgtactgttgcatagttaaaaatgctgggagtctctgcatagatacaaaatattattaaattattacataaatttaattttataaaatttaatcatgcttcttttgtctggtaatagacattggacagatatttttagttcagatggtgattctgaagcttacatctcccttaaaaaaatctaaagcagctcttatgggcttctaattttaatataaataaataatttaaattttattggtgttattggaagaaaaatgctattaatgggctaataaaaaacatgtgtttctcttatggattttaataagctccagtattattcaaatgatcaaaaatatagttataattttttgaattttaaaaatgtgattgctctaataaagaataaaatctatgctttttaacaaacatagttttggtgcctaattctgtaatatgttttattgaaattagattcatttctctaatgtgagaaaaatatatccagtaatagtattgactgtttaaaaaattgagctcatcaaaaatattgtcatcaaatacaggtggttaatctgacatacattgcagttacatgcattatttttatttacaacatttgctccttaatgatgaatttatctgtgttaccctgtttttctacctggaactccatagaatgatgtttgcaaaccaacatgtgctcttttcagtcattcactgttttaatatgacatggtagagaagataaggtttatggcaggtaattttttgtaatgtgtattaaacgaagttcaaagattagaaatacatctgtgtcctgaaaaccttagatacatagccgactgtatacagaggttcatctcaacctcaacactattgacttttggggctggatagttctctgttgtgggggtttgtcttgtgcactgtaggtttttagtagcatccacactttctcctcaccagatgccagttgcaccctcccccaagttgagacaaccaaaaatgtctccagatattgccagctaccccttgagggatggtacctctggttgagaaccattgctagagaatgatctttactgaatttgccctttataagaaacccagtgaatttctagagcaagtcccaaaaactaagggacagctaagaagttattatggttgacttcaaaggcctaaactgtgttttttatgtccactaaacaacttgattaaaagacggaattttgactcgtgtctgtatcatacaagtacaaatactaattttgccctatgtatccgtaaatgtcatttgtgattttgacttatttatttaatgccctttcttatgccgtgggttttcaagtttactcatttctatggttgcaaataactctaaaacttattatataaactttcatattataggcagaacacaatggctaaatatctgttgcatgtactttaaagtttattataaaatataaacagatatataaagatgttgactcttacctgtgattttgcatggtcagactcggtgtcaggtacggagaggattctcatgactgtcttacctctactgaatattctagtgagttatatgatttacggagtgattaacagaggtctatataaagttacttttcccctttacttaattatattgtagtgtgcagataacaaaactgctaccttctcatccaagtggtctgtagaattcatgtcccttacagtggtcatttaaagtcaatatttatttatgtatgtaataaaaaaagttggatttttgtgtatgtctgtcacattatttagagagaagtaatcttgtaaaaatgttttgtaaaaaacaaaaaagtattgtaaatagtcttgatattctgtgactcattattttcatgttagagtttgtacatactggttcaataataaagtatccttaaaccaga

SEQ ID NO: 3347 - DNA, 1713 bp, Homo sapiens
gcgcgagtgctcccgggaactctgcctgcgcggcggcagcgaccggaggccaggcccagcacgccggagctggcctgctggggaggggcgggaggcgcgcgcgggagggtccgcccggccaggccccgggccctcgcagaggccggccgcgctcccagcccgcccggagcccatgcccggcggctggccagtgctgcggcagaagggggggcccggctctgcatggccccggctgctgacatgacttctttgccactcggtgtcaaagtggaggactccgccttcggcaagccggcggggggaggcgcgggccaggcccccagcgccgccgcggccacggcagccgccatgggcgcggacgaggagggggccaagcccaaagtgtccccttcgctcctgcccttcagcgtggaggcgctcatggccgaccacaggaagccgggggccaaggagagcgccctggcgccctccgagggcgtgcaggcggcgggtggctcggcgcagccactgggcgtcccgccggggtcgctgggagccccggacgcgccctcttcgccgcggccgctcggccatttctcggtggggggactcctcaagctgccagaagatgcgctcgtcaaagccgagagccccgagaagcccgagaggaccccgtggatgcagagcccccgcttctccccgccgccggccaggcggctgagccccccagcctgcaccctccgcaaacacaagacgaaccgtaagccgcggacgcccttcaccaccgcgcagctgctggcgctggagcgcaagttccgccagaagcagtacctgtccatcgccgagcgcgcggagttctccagctcgctcagcctcactgagacgcaggtgaagatatggttccagaaccgccgcgccaaggcaaagagactacaagaggcagagctggagaagctgaagatggccgccaagcccatgctgccaccggctgccttcggcctctccttccctctcggcggccccgcagctgtagcggccgcggcgggtgcctcgctctacggtgcctctggccccttccagcgcgccgcgctgcctgtggcgcccgtgggactctacacggcccatgtgggctacagcatgtaccacctgacatagagggtcccaggtccccacctgtgggccagccgattcctccagccctggtgctgtacccccgacgtgctcccctgctcggcaccgccagccgccttccctttaaccctcacactgctccagtttcacctctttgctccctgagttcactctccgaagtctgatccctgccaaaaagtggctggaagagtcccttagtactcttctagcatttagatctacactctcgagttaaagatggggaaactgagggcagagaggttaacagatttatctagggtccccagcagaattgacagttgaacagagctagaggccatgtctcctgcatagcttttccctgtcctgacaccaggcaagaaaagcgcagagaaatcggtgtctgacgattttggaaatgagaacaatctcaaaaaaaaaaaaaaaaaaaaaaaaaaaagaaaagagaaaaaaaagactagccagccaggaagatgaatcctagcttcttccattggaaaatttaagacaagttcaacaacaaaacatttgctctggggggcagggaaaacacagatgtgttgcaaaggtaggttgaaggga

SEQ ID NO: 3348 - DNA, 520 bp, Homo sapiens
tatttcaggcagaggtgcgctctgtaatgttgggcctttgacttcacagtactggagagctgttcacacagatgtttagacctttctctctctctctcttttcttctttctcaacaactctttcacagaggcagtcattttgaaaggttgaaatatttggcctttaccaaagagctttttttttccttaagcaaaatcctttcagaaagaaacaaatggggaagggcagattaagaatgcatatgtcccaatccacttctataggagtttaatcatattcacatgagtaaaatgatggaagaactctttaaggtaatcctttgggataaaggatcctgggaagttctctcaggtaaagaaagcttacagcagatttgtaatatatgtctggagagctatttataagaaatttaagaggattgttttgttttcctttattaaagatttaagcctttttactttgccaaaagaaaactacaaaagttttatagatataacctttgctaattttttaaccttt

SEQ ID NO: 3349 - DNA, 199 bp, Homo sapiens
  misc_feature (1)..(199): n=a,t,g or c
atctctagtgcagaagtgcagctttctgcaggctgcgctcaaatcgctaagttccactctccatcctctgccgcgctactcctggcatgtggatcaccaagatacaatttctggtcctgtctgttcttattgatgtcctttacagttaataaatttgattgccactaaaaaaaaaaaaannaannnaaaaaaaaaaaaa

SEQ ID NO: 3350 - DNA, 298 bp, Homo sapiens; identical to SEQ ID NO: 745

SEQ ID NO: 3351 - DNA, 9453 bp, Homo sapiens
gagctcacattaactatttacagggtaactgcttaggaccagtattatgaggagaatttacctttcccgcctctctttccaagaaacaaggagggggtgaaggtacggagaacagtatttcttctgttgaaagcaacttagctacaaagataaattacagctatgtacactgaaggtagctatttcattccacaaaataagagttttttaaaaagctatgtatgtatgtgctgcatatagagcagatatacagcctattaagcgtcgtcactaaaacataaaacatgtcagcctttcttaaccttactcgccccagtctgtcccgacgtgacttcctcgaccctctaaagacgtacagaccagacacggcggcggcggcgggagaggggattccctgcgcccccggacctcagggccgctcagattcctggagaggaagccaagtgtccttctgccctcccccggtatcccatccaaggcgatcagtccagaactggctctcggaagcgctcgggcaaagactgcgaagaagaaaagacatctggcggaaacctgtgcgcctggggcggtggaactcggggaggagagggagggatcagacaggagagtggggactaccccctctgctcccaaattggggcagcttcctgggtttccgattttctcatttccgtgggtaaaaaaccctgcccccaccgggcttacgcaatttttttaaggggagaggagggaaaaaatttgtgggggggtacgaaaaggcggaaagaaacagtcattcacatgggcttggttttcagtcttataaaaaggaaggttctctcggttagcgaccaattgtcatacgacttgcagtgagcgtcaggagcacgtccaggaactcctcagcagcgcctccttcagctccacagccagacgccctcagacagcaaagcctacccccgcgccgcgccctgcccgccgctcggatgctcgcccgcgccctgctgctgtgcgcggtcctggcgctcagccatacaggtgagtacctggcgccgcgcaccggggactccggttccacgcacccgggcagagtttccgctctgacctcctgggtctatcccagtactccgacttctctccgaatagagaagctacgtgacttgggaaagagcttggaccgctagagtccgaaagaactccgtggatattccagctttcccacaagcactgatcattatgagccagttacttaaccgatctgagacactctcacctcctaaatagggatagatgatactaatttgcaggttgtcattatgataagacaggatctgatcaatatatgtgaattgtttatatttggaacctttttattgagtggaagaagttgttttaaatattctagtcagttctttcctgctcccaggaaagcccggattatgttttaagataagcaaaatgtcttaaaagtaagctgttttactttgaatttttccctaaatgttgattagtgtactagatccattttaatttggaaagtgaagtgctacttatttgaacttcttaaaaatgctaattttaacatctaaagagttaactaagaaaagcttagtaacatgatgtaccaagttgaatatgctgttatccttatttagaatagaaaattggtatttctacgttttatccattctaaggcaggttaaaaaattgtatttccatgactacctatatatttcttgaatttattattgtaaagttgattcatagtcaaacaattaaatgtttaaattaagattaagacactagagaatgatttatttgctgtcctttaattgcagcaaatccttgctgttcccacccatgtcaaaaccgaggtgtatgtatgagtgtgggatttgaccagtataagtgcgattgtacccggacaggattctatggagaaaactgctcaacacgtaagtttgtcctttggttgcctcattaggagtggggctggatacagttatcattgtatagatttgtgtcttataatgagtcccattaatttctccctccctttcttcgtcttcttgcagcggaatttttgacaagaataaaattatttctgaaacccactccaaacacagtgcactacatacttacccacttcaagggattttggaacgttgtgaataacattcccttccttcgaaatgcaattatgagttatgtcttgacatgtaagtacaagtgtctttctaaggtttttagccttctcaaagaaaaatatgctttataatactgtaagcctaatctaaaaacatatttccaagcttatcaaaaagactttaagatagcttttaagtttgccttccatcttaatcgccaaaaatattgacatttagtcccatccagtttatacagtctgctcacaactctgtatacctcttctaacctttactgtttggtcagtttgtggaggtagcatggtccagctgtttattgaatgcccatgggccacagaattgttctgaacatgtagcacccattaaaataaatttggatttggatcagcaagaaaataactttccatgattctaaagtgggtgccatactcagccattcctttcataggcctcttggatagtgagcagatggctacctgaaaaatcaatattgccagattataatgtgcagagtatatgtattttattaaagatgtatttcaagtggccattagactataaagtgtagttgtttaaaaatagattttttttattttggagttacattcaacctcaggtgccactttccacattttacaataaaaataatggttgatttacttaacaaatgagaataaataaaacatttttttctttgaaaatttcagccagatcacatttgattgacagtccaccaacttacaatgctgactatggctacaaaagctgggaagccttctctaacctctcctattatactagagcccttcctcctgtgcctgatgattgcccgactcccttgggtgtcaaaggtgagtaagaagaatccattagagatgtattaactataagacgggctgcattgctgccaaaaaaaaaaattgaccttagactaccatttatttattaacaaaagcagtttttacttttagcatggttatctatgggtattttttaaagtatgagtctatataaactattatgtaaaagcaaatgagcgtcttggtataatgtcttaatattttcaaattatttctttagaaatgaaataattctaattaaaatagataaaatcattcagtaagaagttgttccaccatatcttagaactgttgtttatattatgatcctattcacaattgtaattctcatataaatgaagaattcttggtagattgacagtcaccatctcctttcttgaatacatagatggattcttaccttagctttctcatttttcaggtaaaaagcagcttcctgattcaaatgagattgtggaaaaattgcttctaagaagaaagttcatccctgatccccagggctcaaacatgatgtttgcattctttgcccagcacttcacgcatcagtttttcaagacagatcataagcgagggccagctttcaccaacgggctgggccatggggtaagatagagttaatatcttagagttagtaaaattataccaaatcatagtcaagggctaacattaaaggagatatacagatagatagatccaaataacttatccactttttttaaaaagaagtcttatctataaaaaccttaaaggaattttccatttacttcactggtctagtaaaattatacacacacacagacatgcacacacatatataaacattcacacacatacatatgtacaggtattgttatttgtaatttgacccttgtattttttagtttaaaatgttagtactgcaaaatgttatgtcctcaaaaacacattgtaccatgattatgccgctttcaatattgtaaagtgaggtttttgccgcattattattttttggatttcaatagcatagcttcaagttattcgtaagaattttttataaataatacatttttatacttttttataattaccatatcatcatagtgaagtatataatatatatgatataagctcaatatagtatattaattccgttaaacacaaagacatatcagtttgtagctttggtggataaacaaattaatttagcaattcatggctatgaaaaatgtatattttatttaaaaattttaaagaaagctaaatgatcaaattatttaatgatgaattatatgatagacactttatataagaaaaacttcaacagcaacaaattaaaattttttcatcattttctaggtggacttaaatcatatttacggtgaaactctggctagacagcgtaaactgcgccttttcaaggatggaaaaatgaaatatcaggtatgcttcctttgactattaagacttagttattaccgcttatacccatattttaaaatccctaaaaatgtgttccttaactttttaactgatgtttatttatttatttatttttttagataattgatggagagatgtatcctcccacagtcaaagatactcaggcagagatgatctaccctcctcaagtccctgagcatctacggtttgctgtggggcaggaggtctttggtctggtgcctggtctgatgatgtatgccacaatctggctgcgggaacacaacagagtatgcgatgtgcttaaacaggagcatcctgaatggggtgatgagcagttgttccagacaagcaggctaatactgataggtaaacaagaaaatgatttatataaaaccctcttccccagggaaaattagtgtgctatctttgttatgttttgagtaaatgacaagatgtggtaaatgaaaactcacacattctatatacattaaatatgtaagcatgactgataaaatagctatcttttgatactgacaaggaagaaaacagaaatgaaggaatagcaaattttaaaaattgcattccagttgcttgaaagcttgtgatcagatgcaataaatgtttttattatttattttgtgcaaataggagagactattaagattgtgattgaagattatgtgcaacacttgagtggctatcacttcaaactgaaatttgacccagaactacttttcaacaaacaattccagtaccaaaatcgtattgctgctgaatttaacaccctctatcactggcatccccttctgcctgacacctttcaaattcatgaccagaaatacaactatcaacagtttatctacaacaactctatattgctggaacatggaattacccagtttgttgaatcattcaccaggcaaattgctggcagggtaagcattattattgaaaaccaaaacaaaagactagtcagtaactttagaatttctgccacggaaattatttttcttaaacttactaaaagagtagttagttatattgctagtaaaattattttattgatataagaagcctaactttgtttgaaaagtctaaacttttagtctagtctacagttgtcagacaaatagcaaattgtacccctaccttaaaaatattttcaaaaagtatctataatcttataggaataaatattttaggcttgaatactagtgttatttttgaaatgtaaaaaggcaaattagttctaggctggtgtcccattgaattttaagcagagctcctgttgaaatgtaggtaagcatctttccagcaaataaaaattgtctccgctgggagtttcagttttacctgatttgtacctaaggcaagctgaatacaaacagtaaatatgcctaaaattcttgttttacaactaattttactttccacaggttgctggtggtaggaatgttccacccgcagtacagaaagtatcacaggcttccattgaccagagcaggcagatgaaataccagtcttttaatgagtaccgcaaacgctttatgctgaagccctatgaatcatttgaagaacttacaggtaagaaacagtttctaaacttcttcgttttttgtttgtttgtttgtttttgttgtttttggttttcttttcgagatggagccgccctctgtcacccaggctggagtgcagtggcgccatctcggctcactgcaacctccgcctcctgggttcaagcaattctcctgcctcaacttcctgagtagctgggactacaggctcacgtcgcacgcatggataattttttgtattttcagtatagacggggtttcaccgtgttagccaggctggtctcaaactcctgacctagtgatccgccggcttcggcctcccgaagtgctgggattacaggcgtgagccaccgcgcctggcccctaaacttcttaaaagaatcaggggtcaaatggaaacagagaagttggcagcaaattgagcaaaagaatcaaactgttttttattttgtgaagtttgacattggttgtatctctgtcttcatcgccttcacaggagaaaaggaaatgtctgcagagttggaagcactctatggtgacatcgatgctgtggagctgtatcctgcccttctggtagaaaagcctcggccagatgccatctttggtgaaaccatggtagaagttggagcaccattctccttgaaaggacttatgggtaatgttatatgttctcctgcctactggaagccaagcacttttggtggagaagtgggttttcaaatcatcaacactgcctcaattcagtctctcatctgcaataacgtgaagggctgtccctttacttcattcagtgttccagatccagagctcattaaaacagtcaccatcaatgcaagttcttcccgctccggactagatgatatcaatcccacagtactactaaaagaacgttcgactgaactgtagaagtctaatgatcatatttatttatttatatgaaccatgtctattaatttaattatttaataatatttatattaaactccttatgttacttaacatcttctgtaacagaagtcagtactcctgttgcggagaaaggagtcatacttgtgaagacttttatgtcactactctaaagattttgctgttgctgttaagtttggaaaacagtttttattctgttttataaaccagagagaaatgagttttgacgtctttttacttgaatttcaacttatattataagaacgaaagtaaagatgtttgaatacttaaacactatcacaagatggcaaaatgctgaaagtttttacactgtcgatgtttccaatgcatcttccatgatgcattagaagtaactaatgtttgaaattttaaagtacttttggttatttttctgtcatcaaacaaaaacaggtatcagtgcattattaaatgaatatttaaattagacattaccagtaatttcatgtctactttttaaaatcagcaatgaaacaataatttgaaatttctaaattcatagggtagaatcacctgtaaaagcttgtttgatttcttaaagttattaaacttgtacatataccaaaaagaagctgtcttggatttaaatctgtaaaatcagatgaaattttactacaattgcttgttaaaatattttataagtgatgttcctttttcaccaagagtataaacctttttagtgtgactgttaaaacttccttttaaatcaaaatgccaaatttattaaggtggtggagccactgcagtgttatctcaaaataagaatattttgttgagatattccagaatttgtttatatggctggtaacatgtaaaatctatatcagcaaaagggtctacctttaaaataagcaataacaaagaagaaaaccaaattattgttcaaatttaggtttaaacttttgaagcaaacttttttttatccttgtgcactgcaggcctggtactcagattttgctatgaggttaatgaagtaccaagctgtgcttgaataacgatatgttttctcagattttctgttgtacagtttaatttagcagtccatatcacattgcaaaagtagcaatgacctcataaaatacctcttcaaaatgcttaaattcatttcacacattaattttatctcagtcttgaagccaattcagtaggtgcattggaatcaagcctggctacctgcatgctgttccttttcttttcttcttttagccattttgctaagagacacagtcttctcatcacttcgtttctcctattttgttttactagttttaagatcagagttcactttctttggactctgcctatattttcttacctgaacttttgcaagttttcaggtaaacctcagctcaggactgctatttagctcctcttaagaagattaaaagagaaaaaaaaaggcccttttaaaaatagtatacacttattttaagtgaaaagcagagaattttatttatagctaattttagctatctgtaaccaagatggatgcaaagaggctagtgcctcagagagaactgtacggggtttgtgactggaaaaagttacgttcccattctaattaatgccctttcttatttaaaaacaaaaccaaatgatatctaagtagttctcagcaataataataatgacgataatacttcttttccacatctcattgtcactgacatttaatggtactgtatattacttaatttattgaagattattatttatgtcttattaggacactatggttataaactgtgtttaagcctacaatcattgatttttttttgttatgtcacaatcagtatattttctttggggttacctctctgaatattatgtaaacaatccaaagaaatgattgtattaagatttgtgaataaatttttagaaatctgattggcatattgagatatttaaggttgaatgtttgtccttaggataggcctatgtgctagcccacaaagaatattgtctcattagcctgaatgtgccataagactgaccttttaaaatgttttgagggatctgtggatgcttcgttaatttgttcagccacaatttattgagaaaatattctgtgtcaagcactgtgggttttaatatttttaaatcaaacgctgattacagataatagtatttatataaataattgaaaaaaattttcttttgggaagagggagaaaatgaaataaatatcattaaagataactcaggagaatcttctttacaattttacgtttagaatgtttaaggttaagaaagaaatagtcaatatgcttgtataaaacactgttcactgttttttttaaaaaaaaaacttgatttgttattaacattgatctgctgacaaaacctgggaatttgggttgtgtatgcgaatgtttcagtgcctcagacaaatgtgtatttaacttatgtaaaagataagtctggaaataaatgtctgtttatttttgtactatttaaaaaaaaaaaaaaaaatcgatgtcgactcgagtc

SEQ ID NO: 3352 - DNA, 1620 bp, Homo sapiens
ctctaaagacctacctagatgtggacggggcctggcgcaccaccagctgtgacaccaagctgcagggggctgtgtgtggggttagcagtgggccccctcctccccgaagaataagctaccatggcagctgtccccagggactggcagactccgcgtggattcccttccgggagcactgctattctttccacatggagctgctgctgggccacaaggaggcgcgacagcgctgccagagagcgggtggggccgtcctgtctatcctggatgagatggagaatgtgtttgtctgggagcacctgcagagctatgaggccagagtcggggcgcctggctgggcatgaacttcaaccccaaaggaggcactctggtctggcaggacaacacagctgtgaactactccaactgggggcccccgggcttgggccccagcatgctgagccacaacagctgctactggattcagacaacagcgggctatggcgccccggcgcttgcaccaacatcaccatgggtgtcgtctgcaagcttcctcgtgctgaacagacacttctccccatcagcgcttccagaaaaccagcggccctggtggtggtgctgatggcggtgctgctgctcctggccttgctgaccgcagccctcatcctttaccggaggcgccagaacatcgagcgcggggcctttgagggtgcccgctacagccgcagcagctccagccccaccgaggccactgaaaaaaacatcctggtgtcagacatggaaatgaatgagcaacaagaatacaaccacgcgcgtgggcagggccagggcgggaagatctggggaactggggccctgggtcagtctggccccccaccagctgcctgtccatttggcctatggaagggtgcccttgggagtccctgttcccaaccggaactgggcataccctgggctggtggggtgccaccctcccacaagggctgggctgagacccagctgagtgcaccgtggcgtttccctttctgggggggcctgaggtcttgtcacctggtcctgtgcccccaccggaaccatatgttagatgggaaggggaacgagacctctttctccccagagcccccggcccaggcctgtttcatccgcgccccaggaccccttctttgcagagcccgaggagcctcccctgtcccctcgggcagatctgttgtgtctctcttcccacctggcagcctcagctctgtgcccctcaccctgctccctctcgccccttctctcccaccccttccttctgagccgggccctggggattggggagccctcttgttcctgatgagggtcagctgagggggctgagcatccatcactcctgtgcctgctggggtggctgtggggcgtggcaggagggcctaggtgggttgggcctgagaaccagggcacgggtgtggtgtctgctgggctggagataagactggggagagacaccccaacctcccagggtgggagctgggccgggctgggatgtcatctcctgccgggcgggggagggctctgcccctggaagagtcccctgtggggaccaaataaagttccctaacatctccagctcctggctctggtttggagcaaggggaagggttg

SEQ ID NO: 3353 - DNA, 592 bp, Homo sapiens
  misc_feature (1)..(592): n=a,t,g or c
ttgtantgcattataataacgttcatgaaatcgttacgttgacaggttgggttaatatgaagcttggaatatttttcagtgttttagtaaaactgcaagggtaaaatgcccttaatgccagggaaacacacacaggaaatcaantaccagcatttacacgtcagtaacccttcaagttctgccaccctgtgtggggtaatgccgtgcagctaaaatatgatttacgcaacaccatgactaaggaatttctcatagaacttaantttcttnngaaagctattnggggtttggggcaataagtctatccgggcttactaaatagtnggcccaatgtgctttgtgtgtgtttttagaaacttcttcattggtacccattacagaaaagtnccatgtnattgnnnttgaaaaaccagnggtgtcncccctcttacccaggggggntggaanggtcccttggnacaattttttcaagtgnttccttccctcaattcactnccnncccggnnggnatccantngttccnnttctcnccnnnnnnnnnnnnnnnnnncnnccccccctcctncccctnnctccnntccnccncnttttc

SEQ ID NO: 3354 - DNA, 441 bp, Homo sapiens
ctctagcacagaggcctgagtcatgggaaagagtcacactcctgacccttagtactctgcccccacctctctttactgtgggaaaaccatctcagtaagacctaagtgtccaggagacagaaggagaagaggaagtggatctggaattgggaggagcctccacccacccctgactcctccttatgaagccagctgctgaaattagctactcaccaagagtgaggggcagagacttccagtcactgagtctcccaggcccccttgatctgtaccccacccctatctaacaccacccttggctcccactccagctccctgtattgatataacctgtcaggctggcttggttaggttttactggggcagaggatagggaatctcttattaaaactaacatgaaatatgtgttgttttcatttgcaaatttaaataaagatacat

SEQ ID NO: 3355 - DNA, 477 bp, Homo sapiens; identical to SEQ ID NO: 2800
  misc_feature (1)..(477): n=a,t,g or c

SEQ ID NO: 3356 - DNA, 491 bp, Homo sapiens
  misc_feature (1)..(491): n=a,t,g or c
gcaattttctcaactaaaaatagagatgataatccgaattctccatatattcactaatcaaagacactattttcatactagattcctgagacaaatactcactgaagggcttgtttaaaaataaattgtgttttggtctgttcttgtagataatgcccttctattttaggtagaagctctggaatccctttattgtgctgttgctcttatctgcaaggtggcaagcagttcttttcagcagattttgcccactattcctctgagctgaagttctttgcatagatttggcttaagcttgaattagatccctgcaaaaggcttgctctgtgaatgtcaagatgtaattgtaaatgtcagtaatcacttcatggaacgctaaaatggangaatgtaaggtatttttttaaatggtgggnggaatttccaaaattnggtttgaccnaattccgggaaattaccaaggatttcctatggccgggatttaccnttca

SEQ ID NO: 3357 - DNA, 477 bp, Homo sapiens
  misc_feature (1)..(477): n=a,t,g or c
gtgcttcattggtatttattgcacatggaccaattcctcacacagtagttagttgcaccagagtataaatacttggtaaaacacacaagaggaagtagaatttacacacaagtgctaactttcaccagcaaattcacgtgggcacttggacataaaaaaaaataaaaaatccttaagataattatatttataatatggatacagttacagtaccatgataaaggagtataaaaaggtattttcccaatgaatcattagctcaataacatactagacaacagaagtagagtttgaattttatttaagatctgcccagcccctctccctttaaaaaatatttaatttctttttgtgcaagtaacatcttctgtgggattttgtaattcctaacactgtggcaaaaatgggcattttggaaccactccttttttttggttttnggtttttatccacatgngcagtaatcnggaactggtt

SEQ ID NO: 3358 - DNA, 460 bp, Homo sapiens
ttttttttttttttttttttttttttttcttacagtaccatgggaacaacagtgattgacttgcaaagttttctgtctctatggaaaatgcaaaacagtactacagaaatacacaatgcactgtaagcagcggtttgctgtagtggtccaacaggtacaagcaaacattttggctcagctaggcagtaatccacttaaaccacatcccggggctacggcgacccaaccacagctcctgtgggatcaaaaagaatgggtctgtttaaaaataaaaattgttatgttttgtgctgctgtccaaaggctcaaaggacagagtcatgaggcagaagtttcccaaccagatctagaatcactgggaccacttccttcctttcccttctaccaacctagagacttggactatggtttcaaagtgaaattggcatttctaacaatgaatacccacagccctcactta

SEQ ID NO: 3359 - DNA, 273 bp, Homo sapiens
ggagatagggtcttgctatgttgttgcccaggctggtcttaaacttctggcctcaagtgatcctcccaccttggcctcccaaagtccttggatttcaggcaccagccaccatgcctggccacaaagactatttaataaggaaaaatcctcaaaatgttacataaagatcacatcacaaaacttttacatacagtgttattctgatttatttttgaaggggtaaggagaaggaaaatatatcacttttaaaacgtggaactttcaatttgttgt

SEQ ID NO: 3360 - DNA, 320 bp, Homo sapiens
ggccaaaaatactgtatttttaaccagcaagatcattggggcattattatacaacattaggtgttttttgcaaaactagttcccatccccaaacaatagacagtacatgcatttgaatgacattttaggaacagtaaatattcttttaaatactgcaagttaaaaatgttttctgacaaaactccctaaatacataggtctagtaagggtttccaacaggatgatgggtgaggaatccagcaaggagttgcatttagaagagttctttgaggaaaagaaatccaccaaaaacgtgtttcagtcaaagtaacctggacaaa

SEQ ID NO: 3361 - DNA, 458 bp, Homo sapiens; identical to SEQ ID NO: 3134
  misc_feature (1)..(458): n=a,t,g or c

SEQ ID NO: 3362 - DNA, 397 bp, Homo sapiens
aacaaagaatacattattattattataaggtactcatgagtaaagaacaatgaataatatacatctaattttttaatactcaatgcacaatcaacatttctgatcaacagtataaaccatataaaagagaattctgcttttcatttgtacaaatactgctttcatcattgcaaaactttcaaggttaaaacgtaccatatgttgaagctataaagctattgcttgaatgtttctaaaacgaagttatttgctgtctgttgttaatcggttacattgtcacctctaataccagtcatcaaatccataggatctcttaatttccaagagattgtattgtacagcaagattatttttgtggccaaatcaggtcataggattcctttttttttaaagataa

SEQ ID NO: 3363 - DNA, 412 bp, Homo sapiens
cacctttcttttgtttatttatattctttagttttgtgcacactttgaggaattgatttaggacaggttcatactgaaaaaaacctcagctgatgttatctgtgggggctggggagggtgtcagggacatttggtggctgaggagagcgcgtcactgctattgaatagctccatttaacaccagccatgtctccgcgtctcaggcacttctgtgaaatgttctcagaaccctgtggtgactgcggcacacccggcaggccttgctagcacacgccgcccactggcagggcccggccaccctggctgttgccattctttcgtagggttttgttcattttactatttgtcatttttctaggaaacatctgtttttgtaaaacaaacaagggggaatcaagtattttaaccacaa

SEQ ID NO: 3364 - DNA, 656 bp, Homo sapiens
  misc_feature (1)..(656): n=a,t,g or c
tttttttttttttttttttttttcctaaagacagcatgctttattttctcaaaattccatatgtgactatgagcgtatggagaaatcgtttgatttttaaatttattgttttgtccttggtaggcaatctccttcaaatattattagcaaaatcaaacatagatcaaagtatgtatttgcatcttctgattgaaattaaacagtacttggtttcaaatgttttaaaaataacactttttaaactggagttgatattgaggatcatgtaaaattattctttatagactttgcattctaaatatgaagtttattgttactacttattagttaattccacggcagattttcatttctatcgaatatattatatgtagaaactagggcctaaataattaagctgacttttcctattagttattccttaagataaaattatgctggtgaaaatgactgttgaatttctcagaaattaagctctatagaggctaagtaatcgaaagacttttcccctgaataagtacaataccagaagccaaactctataaagatttcgnattataatccaacngaggcntaaaattatgaaaagccaacnttccctaaangcccctgaatggaatcntctaatgcnccagttnagttnctggataaagngc

SEQ ID NO: 3365 - DNA, 479 bp, Homo sapiens; identical to SEQ ID NO: 562
  misc_feature (1)..(479): n=a,t,g or c

SEQ ID NO: 3366 - DNA, 391 bp, Homo sapiens; identical to SEQ ID NO: 2814

SEQ ID NO: 3367 - DNA, 523 bp, Homo sapiens
  misc_feature (1)..(523): n=a,t,g or c
cccattgggtgacagcgtttattgaaaggaaatcttgctttatccaggaattcactcacatggaggtagctgcaaggagaatgtctctttctcatgacaaccaaagcgaccaaaccataccctaaagcagagacgcaatggaataagtcaacgggcattgtagaacgacactcagaagcaggaaaaaccataaaagatacaggatgattgtctcttcagtattgcatttggccatgtatgtgtttttacataaaatatatgttttctttttaagctagctaaagaaaatactcttgatcggggttagttcttaaagcaaaaaacagaagaaaagtatgtatatataatanaattaaagaacgatagcatgttatacctggaaaggaccgtgggcactaatctgcactttgttccaggtaatccatggctctgagagtgagcacactgtcaaagtcactggggtgagatgagccgggacttggaaaaccctctcttaactttcagtctcaactcctcccactcc

SEQ ID NO: 3368 - DNA, 449 bp, Homo sapiens; identical to SEQ ID NO: 3145

SEQ ID NO: 3369 - DNA, 185 bp, Homo sapiens
ttttttttttttttttttccaattttaacatagaactttattgaaaacacagactcaaatagagaaccatatatttaaacaacgaatagcagggtagcttacttaggtgacacagttcattgaaaacttaatactgaaaaataccgcaatctggacagcaagacaaatatcaacaaatgtgtttt

SEQ ID NO: 3370 - DNA, 364 bp, Homo sapiens
aaaggggaaaaaaaaccaggattaaaggtgattccaactggtaacaacaaatataacagcttgaaaaactcatgacacagacgcataaatataatataaaaagacaattttaaaattgtattgtaggaatataactataataagtggaaaagatacattaaaaccatcagtgtgttacacttgttcaaaacagaactcataaggcagaccaaaactgatgcaagttaaggaaaatggtctgtttttaggaagcatgtccagacagacaccacaaagaaatgccaacagagactatgtggtcccctcttgttactagtaatgtgtcaaaggtggagtgactgggttaacagcctaagctttctcc

SEQ ID NO: 3371 - DNA, 543 bp, Homo sapiens
taagagtgttttcagtattttattaacaaatgagctggcaagaggacaagtgatctagtagtatcacccccaccctcatggagcagccaccacaagcccaccatggtggggggtgtccaacatgctctgctggcccagttcccagccgatcccctgagtcttggcgcccgtttagtcacccttcagctgcttgggaggcaggaagagacttcccctcttcacgaggtaagggagacaaaagcagccatttggatgccagggccacaggggcaagccatgccctatttctttggagggacagaatcacttcttcccaaggccagacactgtagcccatggtactcagccttctagaggagggtagcctagcagaggagaagccctgagtggaagcagcattttgaaggcatcgtcattcttagaccagctaagagctgagggcattctctatctttgccagcagacagtgagactcccggattaaaattaaaagcccgtggtgcatcctttccttgacattaactttccacaaaaccttggagg

SEQ ID NO: 3372 - DNA, 467 bp, Homo sapiens
attttataaacataactgcatctttaattgggtgtacttgaataattgaaaactgaacagcaaatcaatttttatggttcattttctccaacaaacaacaatattaaactgtatgagaagtaatatttattgcaacaggttatgaggtggaaacaaataattagtcttacaatttgctagaagcatgacagagcttactaacattttgaagaaaaaacagcaaagaaagaaatcatcaaacaagatggtatcttgacaaaggcacagcgctccacaactgcttcatactctgtgcacaagaaatcctctcgagagaggagaggagtgatgccaaatgggcttacattagacccgtggacactaccactggtattattcatacaaccaaggctctacaacacccctctggagaaaaagtgcaacacaaaatctgtgtaacaaaggaaagcaaaagtagcaataagggc

SEQ ID NO: 3373 - DNA, 379 bp, Homo sapiens
tactatctagagtctagagctcacagtacagagttttgtgaaatacggtgcctatgagaattttcccatggtacacagaagccacagaggtgccctgaagcacagagccattgttggcatacacggtgctcaccctgggcttctcagacaaaacattctggatgcgaagtacttctgatcctggagggtcctcagggttatagttcagtagcttcataggattaggatggcatcctgccaaaatgtctcctgtggcaggatcgacagtcaggttatccactaaggtgcccaactgtatcaccttcagttgagttaaatcccagttatcatgtttttccattatgtgaatggtcctaactgctacatcagctacatagac

SEQ ID NO: 3374 - DNA, 384 bp, Homo sapiens
gctacctcaaattcggtgggcaacgatagttaacactttcctagtttttagtttatttgactgcattcatacatatctgatcttcacgacaacactgtgacaaagggagaggcaagaatgataatcttcattttacagactgaggaactgccgacagacctgccatctgtccaggccaacataactaacaagtagtggagtccaagacctcagcaaaagttttgttcttttacttttgttagagtggagaagaaaaaaaaaaaggtttacaatgattactgagaaatgaagaaataagccactgtttcttacaagtagatggtcccacatcttaaactttggggaagatatttaaaaatattttttaaatagctggctgctgga

SEQ ID NO: 3375 - DNA, 341 bp, Homo sapiens
ataacacttgaaagtataaaatgctacatttccaaaaatatatatatttttttctgcaccagcacccttgtatagtaaaagtatctactttttgttcatttgtttcaatgcactacactttatctacaatttcattacatgtatacagcaaataggcaagcatggcttttacatccttaatgatttttttctatacagggaggtttaaaaaaaaatacttgaacagtttgcccagtaatgtgacacataatgcatgtaccttgttctcatatttttttaggtgtaaaataaagattcagtaattttaactcagatatttatctttttaaaaatagtgttgc

SEQ ID NO: 3376 - DNA, 410 bp, Homo sapiens
ttttttttttcaaattcagagcatttttattaaaagaacaaaatattaaggcacaaaatacatcaatttttcaaatgaaaacccttcaaacggttatgtcctacattcaacgaaacttcttccaaattacggaataatttaactttttaaaatagaaaaatacaagttcttaaatgcctaaaatttctccccaaataaatgttttcttagttttaatgaagtctcttcatgcagtactgagctccaatattataatgtacacttccttaaaaatctagttttgccacttatatacattcaatatgtttaaccagtatattaaccagtatattaaccaatatgttaaacttcttttaagtataaggcttggtattttgtattgcttattgcatgctttgatcatacaagac

SEQ ID NO: 3377 - DNA, 400 bp, Homo sapiens
ctttaaaaccatttacttacaaactttaattcagcaaaggtccgtgtggggagactggggtggggtcgggggaatagtccccttggagtggatgtggacccccagagtcaagggagggaagctggtggcccagttggctgggggcaaggccaggggtcacctcaggtcgacaggtcctgctggtgggcgggcccagagtttatcttcatggagtgctggtttctggcactgggctggaaggaggccagctccagggatctggcctggggtgggcaggcagaattcaagaattcatcttcaacaagcgagtgacagcagaggctccgggagatgggcacaatgtccgactcccacagacagacagcaggggactggcagagaaagcccatctctgcacgga

SEQ ID NO: 3378 - DNA, 338 bp, Homo sapiens
cctttttccaatcttcattctcggggttggcccgccccgatagtcactccatgtcctcgtttactggttcatcttcgtaatctctgtcatggtcaaaatctggactgtggttggctgttgtcactaaggacaggggcccttcagcttcctctggatcgaggggctcttctttgacgtgtacaggatgcacggcttgcataggagatctgcctggactgctgtcactctcgttgctgttggtatgctccattgccccgttcagctcttcccgtattgcgctggctaagttgcccagagtgggatttcccatggaagcggtagtgtatagaggtatacta

SEQ ID NO: 3379 - DNA, 469 bp, Homo sapiens; identical to SEQ ID NO: 2121

SEQ ID NO: 3380 - DNA, 343 bp, Homo sapiens
ggtgtggccagagctccaatctgtgtcagatatttatttatgctgcttattaaggggtctccaggcacccctgtgacagaagagactaatcagtcatcagccaggacccaggcatgtcctgggctcctgtgtccagcatgaggtctgtggctgatcttgcagctgaggcctgaagggtgagcgaacattgacctgtcccaactttgggcggcctctgccccataagggagactgagcagccagaggctttaaggggatgaaggcctggcctgagcccatgtggccttagggtggaagcaccaggaccacagaacacgtgtctaaaagacttgcctgcctctaa

SEQ ID NO: 3381 - DNA, 547 bp, Homo sapiens
tttgggttttgtaaatcatttattatgactgaaagggaagaaaatgataggagacaaatattacaattaaacatgtaacattattctcttgtaaccaatcataataacatactttgaatttttgaatggctatataatttcccagaaaataaaattttcacatcatcagttacagaaaattgatttccttccatcaaaatattttatctctgctctatcaaaaataaatgccaagtctaaggtactacacagtttaagataagccttcactacttgtttaaattagaggagtgtggggaggggcttaccaaatgatgaataaactactgcctgagaataaagccctcacacataagtaacagctctgtcaagcctctggtcaccaactaattattaaatggctctctaggaacttagaaactcttctgtaacccagccaaaaggcttctgagagtcatcacaaactggttaccagtttattctcaaaaacaaatttgcttattcgatgggcgactgtggctcaaaagatgtaggggaaacagtcaat

SEQ ID NO: 3382 - DNA, 423 bp, Homo sapiens
tttaattttaaagaaggtatatttatttaacaaacatgtatgaactattcattaacaatccaggactgtggaggacaggggacagaaacaagcctcgaagagatcacaatatggtggagtgcatgcatggcacacctggctatctgaatcagacgtttgcctctgtgtgtgtgatgaagacagtagtgagtggaatggacagagagtaactgtaaattctgtagggaggaaaacgaacgtttactcattctctaacagtcttttgctttactatggtcatatacaacagttaatctcccatcctcagttcccagatacccaccagaaaaccggtaattaacctctggataaactttcactgattacagatgaggagcgaggcaaccttaagccataaacaatattcctacagtatgggggagc

SEQ ID NO: 3383 - DNA, 379 bp, Homo sapiens
  misc_feature (1)..(379): n=a,t,g or c
ttttgtggataatatttatttgtatcttatctatagaacaaatatttacagatacaaacggaatcacagcaaagttgctataaaaccatccagacctctcgatggccacttctgaaaacatccacggtgaagggcagggcaggcctggctgtggagtgggccagctgagtacctgggcgtcacaagggaaatggttggggattatggcttcagcactctgccggagcacattcctgagcgctgacaacgtggagccctcaccgcccccacctaccccaacctcaatggggaaggaaaggggcctgagctgggcagggctgccgnggctcactatgtgcctgctccaggagtccctggcccctgtgctggcaggagcatc

SEQ ID NO: 3384 - DNA, 393 bp, Homo sapiens
ttttttgggatttcattatctcagtttactttaatttgcttgtttacacacacgatctgtgtgtacataacagtggcaagagccattctctaaatacaatctggtacccagactatgacagatgcacgtggaaaatgaggcgtcagtgaattaatctcaacatagaaaggcaaaataagcatggcagtattctatgatcacagatgcccccagagcctgggggtaaccgacacttttcaacataatacaggacaattttaacaaaagacccagactccaaatggcacccaaaatatattcgtttctctgccttctctagaggagtcagaaagttctaaaggcttactcaagaaaaaggaggcagggagactatggcctgctaagcacagatgc

SEQ ID NO: 3385 - DNA, 457 bp, Homo sapiens; identical to SEQ ID NO: 1519

SEQ ID NO: 3386 - DNA, 286 bp, Homo sapiens; identical to SEQ ID NO: 592

SEQ ID NO: 3387 - DNA, 427 bp, Homo sapiens
tttttttttttttttttgctataagataatttattacagactagcctataatctcctgtaacaatggcacatataataattaacaacagcaaagatgcttggtttcttgtttcatgtaatggccagtacatctgtggacaatgtcgagtcctcaggaagtccaggaggctgctacagaggaaatccaagaaccatgtcacatctctcaacaagtcttgggaagtccatctgactctctgaaacagtttgtctctgacctcccaggaagtgtggagggccccttccatccagcctgtacagagggatcagagtccaggctccttctatagggttgaatatcagaggggaatagcaaatgaccccgatgagagagagagagaccaaaggctagattctttctgcaaggtggaggacggctagaaggcag

SEQ ID NO: 3388 - DNA, 379 bp, Homo sapiens
gagatataaaaatctgtatttatattacaatgacataaggacacagcacggcccacacggtggacaggtggccggggccactttccccctctagcgcaccccccctcaccggcaccaggccctcgtgtggcccccgactctggcacggaacctgccctagtgcccaacatggacctggggccaccctgctggccgagggtcagggtcctctgtgcaggcagtggggagggggtcccaggttccctgacagagggaggcagggcacgggggagcctgcctcacccagcggacagcacgggccggggcagacagagcagggaccctagggccacagaccggtacagggttccaccacccggggacacaggcccaagcaccg

SEQ ID NO: 3389 - DNA, 396 bp, Homo sapiens
gctgaaaaggcatgattttattgcacactcacaatatgacaggtgctgtgctactcatcaacactcttttcaaaacaggatttggagacaggattcttcaaaagagaactgcacattcaactaaacatgtccaaaaaacttcaactcttttgaattagtctccaaatctacacaaaccatagaaaatagaagatcattaaaatacatgattatacacagacaaatggacaaatgaaacagtaattaatattgcttgagctcagattgctcctgtaagatctgcagaaatcgtatgatggggtaaggttttctagaacaatatttcatcaggagataatggcagtatctcattagactaaaaggagatgatagatgctggaagatcagttttcatac

SEQ ID NO: 3390 - DNA, 440 bp, Homo sapiens; identical to SEQ ID NO: 3174

SEQ ID NO: 3391 - DNA, 470 bp, Homo sapiens
tttaacagaggacgtcattttattggctgtccacgggaagtttcatcacacacggaggtgaagactgtgggggttgtggcacacaatatctcaacacgagacctcatcgagcggccaaacagaaggtgaagtgacacccgacacgacggaaccccagccgccctctgcagccccggtgccacctctccacagacgcctcagcccagtaagctgagtgatgacactgtccattagtctcagttcgttgcactgtcttccaacaaaacagcacttgaaaattcacaaaattaaaaaaagaaaaagaaagcagcacttccttggaaatagcaacaccactgtaacacagacggcagcgtggcatgcagatccacacctggtcggttttttccctttaggattttttttttttttaattaacaaatggaatggcaggtctgtttcaaatattagtagcataacacataagtgca

SEQ ID NO: 3392 - DNA, 500 bp, Homo sapiens
ttttttccgcaggtctgaaatggactttaattggcttttgtctctagaattacccacccgttcctgcgctctacggttctccatgccccctccagtttgggggtctaaaccgaacaggagaggtgcaggggaccaggaggtgtcctggcacaaaggttcgggggtctccctggcaaggggtcccagggcctggagccgaggcccagccaaaagcacacagcatcaaaacatgtttttagtgggaagctccaggccctgcccctccccgggggcctcgaggatgtggagcaggtggaatcctgtctgcctccaggtcatggcagtgcaggcggtgagctgggggccagcaggggcgcggacagtgcggcgtggtcgaacagagggttgcgcacctccatttccccggtcggggccaggcccgggcactcgtacaccgtgaagtctccgtcctcattctcctcatccgaggaggccgtgtccagctcctctgggtggctctt

SEQ ID NO: 3393 - DNA, 406 bp, Homo sapiens; identical to SEQ ID NO: 611

SEQ ID NO: 3394 - DNA, 443 bp, Homo sapiens
ttttctcataaacaggaactttattaaactacatgttacataaaagaacatataaatggaccattaaatacattcagtttattttaaacaaatttacatagatacttatttacatttctccattgtattcttaaattatttttccaagcttactaccgataaaaggtaatacaatgatcatctgctcacacagatgcatagagaagttgtccacagggctaagtaaagcaccacttcccaggaaacacagcttattagatcttccagcaacaactcatgctgaaggtgctctcttctgagcagcccttgaggtgaggcttttgctttagagatgctgggggttggttctgaggagctgacccagggcagagatgggtccttgctgattgacctgacttggactcacagaggtggaaagacctgtggagaccatcatcgaggcc

SEQ ID NO: 3395 - DNA, 428 bp, Homo sapiens
ttttttttcgtaaacaaaatttaatacaaccatatagtcaagtaataatggttaaaagacattttattagatacaacttttaaaaaattaaactatgcaagaagtatatttaaacaaaacatgtaagtaagtattcacgtgctacaacttaactaagaacaattaaatacaaagcattctttccactatgaagactctggagcctctaattgaaagcaaatgaccttaggtctatactagttgtaaagcagattatacttttgttcaactctaaatttgtattgtcttagagctccaacaactctcaataaaaatttaaataaagaaaccttgggggaggggtgatagggaaggggagagtaagtgcttttttaagaaagttaaatgaaaaagcctgaagagggaaaaaattgtacataagtatggaa

SEQ ID NO: 3396 - DNA, 305 bp, Homo sapiens; identical to SEQ ID NO: 612

SEQ ID NO: 3397 - DNA, 412 bp, Homo sapiens; identical to SEQ ID NO: 2832

SEQ ID NO: 3398 - DNA, 277 bp, Homo sapiens; identical to SEQ ID NO: 2839

SEQ ID NO: 3399 - DNA, 450 bp, Homo sapiens
ttgtggcagaaacattttaattgtaaacagcaaggctctctgccaggcagcccagatgaacaggggtggcactgtgctggggtgaggtgctttctttgtgggaacgaaagcagacggcccaccctcgtctagccctgggcccctgtccccaaggccagctcgctgagcctgcgctcctcctggaagcggatgagggcatctctctggttgaccaaatccaccagcttcctcaggacctggtcctcagcctgccgatcagcagctgtctttaggttttcttcccggttcatgtagcctcgtagctcctggtccagctgccactgtttctcctccagattcaattcctgcaccgtgatcatgagctcggcctcctcagccaccaggtggtttttcttgtcaacgagctgtagcagctgtcctacccatagtttcttttgctgttctggggaa

SEQ ID NO: 3400 - DNA, 465 bp, Homo sapiens
tttttgaattttttaaattatttttattttttgatgaaaacaagaaatacggtagtgacactttatttttccttcaagcacatgggagaagacaaaagtactaaatgatcattgagtttgacagagaaattctactggtacttacactgcttaggaacataaatgtcaagtacattactagggcaagaaatatcaagtaagacaacagagtcgtatttttctttttgaggttattttcacaagacatagctataatttgtaaaatattcagactattgaaagatcacattcaaattatatttctaagaatagagccatatatgaacagagagcaaaacaagctaatacattaatgaatattcactgaattcttcatactgcacaggacacaaatttggtatttttgcacatgttgtcaattataagcaaaaagcaggcctgtaaacatcaattttgtcataggct

SEQ ID NO: 3401 - DNA, 207 bp, Homo sapiens
ttttacctcctttctgttgttttatactttatttgagaagagaccctacataaactatgtcaggaggatacaggtctacacacgatttcatcaatcaaaaaatggagttgttaacataacattgaagatatgatactatgagaaagacagacatatgaccaaggagtatttacaactctcacttatgatatatttatattgaagatg

SEQ ID NO: 3402 - DNA, 418 bp, Homo sapiens; identical to SEQ ID NO: 2842

SEQ ID NO: 3403 - DNA, 379 bp, Homo sapiens
gggaacgtgaattttaatgagggggcagaccgaggaggtggtggctgcccggagatcagggccaggctgtgctagatggcgcctggaaggggggtcacccaagtctccctgctgtcatttcaggaggccgacccaagtctccctgctgtcatttcaggaggccgaattttttcccaatcccagagaaggtgtcagaggcctggttagcagtcttgtcgatggtttcctgggtggtcttggccagctggtccatggctttctgccccgcctctgtggcctggtccaccacttgctgagctgccgctccggccgctgacacggcttcctgggcggtcccctccacctgttgcttcaggtcctgcaagcacttgcttgccat

SEQ ID NO: 3404 - DNA, 410 bp, Homo sapiens
tagagagttgagtaaaaggtttattattagtgcagtcaacaccatggaacagcacatacaacacaaccagcaacctgcagagacactagtgcaaagggtagggaagcctttcactgagcttcctggctccatctgagggtaaggacaggacagtatgagccttggttaaggcaggtaggggaaaggggagtggaagaaatgtagtaaccagagtaagtatagcagcgttttcaaattcctgagcacaatgtcccagagctggaaccctactcccctcaagctttccaccccaatcccagtggagccatgatccaactacccagacctgcagcaagctagcctggaataaaattctgagaggaagccattacatggtggggaggagcctttctatctccaaccacactccc

SEQ ID NO: 3405 - DNA, 442 bp, Homo sapiens
tcaacctactcaccaaaaaatttgcactttgactcatattggcctattttaacatttcaaaatcatttaaagaaaaatatgactttttctgtcataattcccagtcttagtctctatctttgatcaaaaagaggatagggcaatacattaaattgacaaggcatataacagccactgaatctttctgttcatgagaagaaatcccagatacaccataaatgagatgcaaaccagcagtaagaatgatggcaaggtttctgtatttccatcagaaattgtggaaaagggcctaaaaccaggaaagacaaggccattaaaaaaatgtatttgaggccgggtgcggtggctgacacctgtaatccccactactagggaggctgaggcaggagaatcacccgaactgggaatgcagagattccagtaagctgagatcgcgccactg

SEQ ID NO: 3406 - DNA, 288 bp, Homo sapiens; identical to SEQ ID NO: 2132

SEQ ID NO: 3407 - DNA, 597 bp, Homo sapiens
ttttttttttctttttcttttttcttagaatgttagtgatgactgacagttctggtgcacagttacaatgtacaagtgaaatgaatatgatttgcattgttaaggcatccaatctgctggtttatatttatgtgaaagacagaggaaatatacaagcagacttaagaaagaaagtatgttcattgatttctatgaagtttctccctagaatttaatgcacaaaatgcgtcactccaaagggagagattccatgcatattaatagagtaaaacagcattagggttgttttgtaagcttccaaagcaaaggatacatttttttttaaatctactgaactaaatactacaagaataatatgctactatttttttttttgccatatattggaaaaaacttcttaacttacaaataatacaaaaatagacaatgacttttgggtggaaattaaaaaaactgaagcatggtttataacaatacaaaaataactatgaatggaatggtttaaaatcacattggaacagctaatacaagtgtaggtgacccaacaaatacgcacttttcacgtggcaacttgcccttaaatagaagtggggggag

SEQ ID NO: 3408 - DNA, 419 bp, Homo sapiens
tttttcatgttaaaatgtgaactttaattgtaaaaatcattttctgtaaatatagttatatcaacctctctgcacacaacttggttcagatatatacagatatgatattcatagatgttatttgtaccacagaacaaaatcaattcaagaaacatttacttttagcttcaggattaaccccagctttctttaggccttaaaattaccaccactggaaacagagagagagcacggcatacctgggcacaccagtattcagggcaaaatctatgcagtgtcttactaatttcatactatgaggtaaagacccgaaacaaaaatagattcagtctctcgtattgctataactcttaggctggggtattaatcaaaataggatttttacatttaaggcgacagggaggctatgctgattctaa

SEQ ID NO: 3409 - DNA, 364 bp, Homo sapiens
ttttttttttagtttgaaatacatttttaatttttgaaaaatcaatatgtaatctacaaaatattttgttacatgattaaggctcaacctgtcttatatttgcattgacagaatacaaaactgtattttaagtaagacattataatagtcattgttaaggaagtccttctaactgactttataagaaaaggggctgtatcacaagcatagctctggaatgaagggaactaacatcctagaactgtctaatatatacatcaggttgtaaaattccagcctttatttatgtgctggaaagtatcttttttacatatctttttttagtggataaactcttgtgattcccacagaaaaaggaaatgtt

SEQ ID NO: 3410 - DNA, 358 bp, Homo sapiens
gttaaaaaataaaagccaaaataacacttttaagatcccaggttttagacaaggcagctgtagtctctccatcatcctcactgtccatttgcttcttcctgggacagacactgtggcccagtgaagctgaggggaccctgggattcaaagctggtggaatggaccctccctccccccacaagctgtaataacctgctggaatcccacacaacctgagggcttcacttgtcaacagctcccttccctcagaggctattttgaggcaggcattcggtgttttatgactgagctacccaggagaatggtttgaggccacactcaactgttccaaggagcagcactggaccaaaggctgctt

SEQ ID NO: 3411 - DNA, 431 bp, Homo sapiens
tttttcaggtttggcacataaattttatttaactttcacattgacacaatcaggaaaccattctgagaaaaggtagaggccgccttgaagcgaacgctggctccctcctccaccccgggctcggcggcaccatgcaggctcaggctggcactcatcccaggaaactgtcccagttctcagcggtcctggctgtggacggtatctgaaatggtcgctgcggcttgccctgcaccagggcctaccttgttgccaggaagccgcactgctggaggctacctgggcgctgggttttattgctggtgaacttggttacccaccttccagtcacatggtccaggatggtggtgtgatcagaaatggctctggcagtgccattttgctgagatgaaaggaatcgaaatgtataaactacactgaattctgtgatgctg

SEQ ID NO: 3412 - DNA, 357 bp, Homo sapiens
ttttttttgagagttcaaaccatttactaagcagattcttagccttcccactcccgccctctctcaagctccggtgcccacaagccttgcctggggagatgctggagtgagaccgggagctcaggccaagtcactggtccctgggctcgggcctgccgagtggagtaaagaccagctgtacacatcttccggtgggggccctgggctctgcatccgcccctccgaagtcagcaggagcctctgggaagtaaggcagcagcacagacccccagcgtcttggaggggaagcgaaatcctcagtctgacacccgctctgcctatggaaacagcgccggcacagaaaaggaaacttcattc

SEQ ID NO: 3413 - DNA, 370 bp, Homo sapiens
ttgtgtttttttttggtgtatttttaataagatatttaatacgtgttcaggtagaagtaggtacaatgacagaaaataaggtagaggaatgttcttgacaccacagatacgtaatgatggacaataaatgacatgatgtggagagttcacccacacatgcagacttcttatgttcacataaacatttatctgcatgcatcacccagtagagacaaactgcacttatactgtgaagtcaacgaggagataaagtaaaaatcaaatacttatggagagagtcagtctctccatttagtgggaaagccttcagaacacgcacacagcatctcccctcccttctgaataccatccatagcctgcagcagtagat

SEQ ID NO: 3414 - DNA, 283 bp, Homo sapiens
ctgggacaattaagctttatttttcatatatatatatayyyycatatatatatatacatacatatataaagggaacaatttkcaaatttacacaactgacaaaaccatatatacacacatatgtatgcatacacacagacagacacacacacccgaagtctctagccaggcgccgtttymcatcccyaagtaccattctctcatttgggcccytctagggktggggcccycgtgccgaattcctkmagcccgggggatccmctagttytagagcggccccacc

SEQ ID NO: 3415 - DNA, 224 bp, Homo sapiens; identical to SEQ ID NO: 660

SEQ ID NO: 3416 - DNA, 305 bp, Homo sapiens; identical to SEQ ID NO: 2145
  misc_feature (1)..(305): n=a,t,g or c

SEQ ID NO: 3417 - DNA, 287 bp, Homo sapiens
ttttttttttggtcattaacacagtttattattggcacacttatcagtaaagcatacataaaatacagctgttttttaacacacggagccactgtgcctttacatgtgtggaggaacatattaatatgcaaatggaaaaattaattctcttataaagtttcacataaatacactggagttgcccaaaaacgaaaagtcccataaaagaaccaggtgagagctttacaaaatatcatacaagaaatatactataaaaagaaggatggtcactcaggtacaattagaaa

SEQ ID NO: 3418 - DNA, 375 bp, Homo sapiens
  misc_feature (1)..(375): n=a,t,g or c
cacagttanaaannattttattaatatctcacaatctaacttgaaatatttataaacactgcataaatgaatacaagggcactgtatgaattttagaaaggggactcttttatacaaataaatttaggtttaattctgccagataaaattaattttagatatgtccaacacacaatcaaangtattctgaaaagttgtatataggntcaaatcatagtttaanggccattcacaaaataactgtaaattccccaattttatcttttaaaatatggaatttttaatatatcattttcttangggtaaaggtacacctttaattttnggggtggtaaatnggggntaatctttccaaaatgccctttaaaaaattng

SEQ ID NO: 3419 - DNA, 372 bp, Homo sapiens
  misc_feature (1)..(372): n=a,t,g or c
ttttagaaaatttattatgaattccgagaagtctgctcatcatatacctcccccagccccaaataaaacaaacaacatgtttgtacataaagcctgggtttacttggnacaaaatttgagtctttgaaaaaaatagttaatggnaaatctcaataaaaattcattttgaaagtaaccngtactgttcaggaaataaggggngtcatgttacttgaggangtcaaacagttttattacaggaactatgtgtatatattttggggnttaaaacttgccnataggctgtttggaaagggntaggctcataatttattccnaatagggtattttnttaatcnaatgtttttggggttatcnaccataaccccntgg

SEQ ID NO: 3420 - DNA, 267 bp, Homo sapiens
taagatttgattttcttttatttgtggcactaaaagacagatagctgtgatgaagagcaattggctggtagctcgtgcctcaccaagagtttagcaacgttaatcagtgaatgcagaacagcttccattctacctgaggcctagatctgagatcgctgtgaaacattaaagtgacctcaccatacttgttttctcactcagatacacattttatttcatcaacacatcttgatttctattacttttttcaatataacaaaatgtttt

SEQ ID NO: 3421 - DNA, 511 bp, Homo sapiens; identical to SEQ ID NO: 3249
  misc_feature (1)..(511): n=a,t,g or c

SEQ ID NO: 3422 - DNA, 503 bp, Homo sapiens
aaagaattaccataagttttatttttgcttagttttattaaaaaaataaatatgtcataaagctttctttttccttagggagaaaaaaaggaacaagtctcataaacccaaataagcaatggtaaggtgtcttaacttgaaaaagattaggagtcactggtttacaagttataattgaatgaaagaactgtaacagccacagttggccatttcatgccaatggagcaaacaacaggattaactagggcaaaataaataagtgtgtggaagccctgataagtgcttaataaacagactgattcactgagacatcagtacagatacatcttgcttaaacaacacagaagttcctgaaaagttttgtgtaaatgatataaccacaaacattaccaggagagcttgggtaactgaaagaattccatggcgaattcctttggtgaacaactactttcacttttggtaaatccaggtatttgctttttataaggagtttacctagttgc

SEQ ID NO: 3423 - DNA, 438 bp, Homo sapiens
cttataaaatggaaaactttaattgtttaaagaaaaggcacaagtaaacatttcaggttatcatacaatgttacaataaaaaattccaatagcaaaatgaaacacattataactttgcttcttggtagtatactgaatgtattattctatcatctcctctttggagtaaaaagaagggataggcagatcaatggatgtgatgtaaaaacttggatcataaatagcatccactatacctttaaccagaaattaaacttcagtagaattaaaattaatttttaaaacttagttttgttaataatagagcagcagtaactttcaagctaaaactcattgttttagtaagtaaataactgatttcatgaaatgttcgctgtcaatgtctggtatgttaatatacattaatcaagccgggtcctgaaacagttttaccaaaat

SEQ ID NO: 3424 - DNA, 367 bp, Homo sapiens; identical to SEQ ID NO: 1019

SEQ ID NO: 3425 - DNA, 268 bp, Homo sapiens
  misc_feature (1)..(268): n=a,t,g or c
attggaatattttatttacattttatatttaaagagaatcaatacaaattgggacatatttacagcatttcaaatcagtgtacaagaatgcaatggtttcatccattcagcaaacaaaaatacatgtctgttttatttttgcctaaattctgctataatttgaacaaaattctaaaacaaaagccacacagagtacaaataaagtgcatttttaaatagctctatttaactttggnggatgaaacttcaaactntatattaaggggcc

SEQ ID NO: 3426 - DNA, 450 bp, Homo sapiens; identical to SEQ ID NO: 196
  misc_feature (1)..(450): n=a,t,g or c

SEQ ID NO: 3427 - DNA, 320 bp, Homo sapiens
  misc_feature (1)..(320): n=a,t,g or c
cctttttcttaaggaatccattcatgttggaagcccagattccctaacatatgcactagtggttggctctgggaagtaacagtcaccagagtctggaagttcttcgcttgaactttgagtagccactggtactattggaagccagatggccanggtattggnaaatgggcaaggggaaatcccaagctgggctcaagagccgtgggttagggaagaagaaggtcaagtggactggtaaaaattctacttcaactgcccttattcatagatacaactttcctaacagtctcactctccaccagtcccatatccacaaccca

SEQ ID NO: 3428 - DNA, 232 bp, Homo sapiens
gccagacaatctttttattgttcactgaaaaatgcaggtctgcaaagagtcaattgcattgtatattgaatgcaaggtctgatattgcaagtatatatgacatggtataacatataaaatattacatattttacacagtgacagtacccgcctcttctaaacactaaaatttaatagaatgaagtaaaaagcctattaaataagaaacaaacactgcaatcataaacaaaat

SEQ ID NO: 3429 - DNA, 527 bp, Homo sapiens; identical to SEQ ID NO: 3263
  misc_feature (1)..(527): n=a,t,g or c

SEQ ID NO: 3430 - DNA, 610 bp, Homo sapiens; identical to SEQ ID NO: 2174
  misc_feature (1)..(610): n=a,t,g or c

SEQ ID NO: 3431 - DNA, 195 bp, Homo sapiens; identical to SEQ ID NO: 2878
  misc_feature (1)..(195): n=a,t,g or c

SEQ ID NO: 3432 - DNA, 399 bp, Homo sapiens
  misc_feature (1)..(399): n=a,t,g or c
ttttttttttttttttcaatcaagnttttaatgaaaagatcataaaataacagtttcttatccgctgtacatttaagactgcacacttctgaatggagagatcagtcgttggtgaattgcttttctatgacactgggcagctntntagctcaagctctgacctgantttatacaaactctcaagggacatgaactcaatntgacaagtgacagcggcggtggccagtacaggagtgcgatcccggtntccctccccccttntgggaagggcataaaacaaaacatgatccctnttccagttccaattaaacaaaacagctntaaccccntccctnccccntcccnttcgagggnttttgcgaggaattgagccagtgcccaacctgggggtcccccccg

SEQ ID NO: 3433 - DNA, 330 bp, Homo sapiens
  misc_feature (1)..(330): n=a,t,g or c
tttttttttttttttttggctagaattgcatcgtaacagtgtggtcacactggntaagaaatgcagattggcaatcatgtacatctctgattaaaacaacactcacataaccaacacaatttgctaggccaaagtcttcacgggcaatccctggggtgggagtctgggatggggtggataatgaaggatacctggggttgcagaagtggggtgggaatccctggggcatcagtccacaggaggttggggccagcgatggcttcaggggtgatatttccaatatatatcagccctgggcacttttcgccctgctgctcacagcatggtcct

SEQ ID NO: 3434 - DNA, 296 bp, Homo sapiens
  misc_feature (1)..(296): n=a,t,g or c
cttcacttttatttccattttaacaactagtacattatccttggccttaggaaaagcctccatcagttctatgtgttcccaaaatataagctcatgtgataacgaggtcaggcaattcagttttttaattcataaagtgcattcttcagacagcttcaaataatgtctaattaagtagccactagaagatcagaaattattagaatggactacagctatgaaaactaataccaatctcttaaattcaataaacaaaaattaaataccnttagggatttaggttacataggttttta

SEQ ID NO: 3435 - DNA, 267 bp, Homo sapiens
ctatttcttttttttttcctctttttttgtttttgtttttttgcaaaactaattctttcactttcctgtcataaaatcacctctgaaaacacaacttctttacaaaaaagtcacgaatgacacgaactctcaggaaaacacatttctatggtctctggaaacacctgtaactggcacccaggtggtcactcacctgggggagggggtcagggggaaatcacctccaaggacagaggagaaataccagcccttatttgggcgaaaagc

SEQ ID NO: 3436 - DNA, 301 bp, Homo sapiens
  misc_feature (1)..(301): n=a,t,g or c
ttttttnntttgtggattttccttttaatgcaaaatgttgcaatacaaaacaatgtggagaaagcctgttcctcaggcactgaagggaggagtgaggaagagaggacagagctggacgtctcctcctatttctccctccccaagtcactctgaggggaagaacactgctgcctgctccctgggcctgccgcatacaaggttagagccctgggtctggggcatccttagcctgaaatttgttgacatggggcaggagagcaggagggaacattgagggttttgactcttcgggctctaaaag

SEQ ID NO: 3437 - DNA, 289 bp, Homo sapiens
  misc_feature (1)..(289): n=a,t,g or c
aaggngttgngattgctttaaagaaagctttatttactacatacatcctaagaatgtactgtaaatggagcaagatctaaataaaagcttttcaaatataaagcagctaaagttaactaaaccactagcaatgtttgaaaacagaactctaaaactttttttttacatttatatagtttgttcttaacactaaaaaaaaaaaaagttcacatttcaagttataaacttaccctcaggtaggtgtaccatggaaatgggttttggaaaccataggggnccaggtaggccc

SEQ ID NO: 3438 - DNA, 329 bp, Homo sapiens
  misc_feature (1)..(329): n=a,t,g or c
ggtntttaaataaattttattgtctatattaaggtatacaacacaatgttaaatgaaacatatatatatatatagtaaaactatagtggaacaatgaacatacccatcatctcacatagttactgattattcccccattggcaagagcaggtataatctactcatttagcaaaaagtcctgaacacaatatacaatatgtattaactatagtcctcatgttgtacatttgatctttgatcttttcacttgttcatcctgcatatttactactttgcatcctttgacctacatctcatttcctccaccttatcctgaccttagtaattac

SEQ ID NO: 3439 - DNA, 308 bp, Homo sapiens
  misc_feature (1)..(308): n=a,t,g or c
ctgtcacttctactgtcaagatggttgagagttgacagtttgtctagaagaaggctgatatatgtcaacatggtcagcaaaggatttaaatatgggtctttgaataataaatagctaataattgagtttattaaaatgaatttttgtataatttaggcagttgaaggtctagaacagcctgcgttcctttctatggcagcttgctatgaaattcatgtttcaaacaaaacaatactttttcatgcataggataaattataaatgtactgaccnggcccattctatatggttaattctnacgganttta

SEQ ID NO: 3440 - DNA, 251 bp, Homo sapiens
gtagagatggggttttgccatgttgcctaggctgatctcaaatccctgggctcaagcaatccacccacctcagccttccaaagtgctgggattacagatgtgagccaccacctacagcctggccaagaacccttttctctcccacattcccctgggagcagaggataggcctgatgattgttttaaacagtagaaagggttcagctaagaactacagtccactctcagccctgtcatgtactataggacaa

SEQ ID NO: 3441 - DNA, 432 bp, Homo sapiens; identical to SEQ ID NO: 807

SEQ ID NO: 3442 - DNA, 292 bp, Homo sapiens
  misc_feature (1)..(292): n=a,t,g or c
caacgcctttattaagaaatatcaaaagttgattacaggtccatatgcagttttacaaagttcaagtgaagaagactgtagggatgccatcaatgtgcgtgtctgaagactatggaagcttgtcaaaggggtaaccctacaactcctgtcactttaacantggtccacagcaatgcttttcccccatttctactaggctaggccattgcacaataccttaagctacttaaaagagttttaatacgttataaatacgtacatatttgtccttctagtttgttaccatccttcc

SEQ ID NO: 3443 - DNA, 258 bp, Homo sapiens
cagattttcttgctttaattcttctctatattaccacagtaaaatatttaacaaagtccaagagattactgatatgcaataatgacctatgactttacattaatggagtgatgtatcaataataaactgatcagttaagtaactggaaaatgtttgcatgtaaagaatgattcactatcctttttatcttgtattgaaatcgtcaaaacatttaaaaacacaaagttgaagtaattttaaataataataactgtgaaa

SEQ ID NO: 3444 - DNA, 394 bp, Homo sapiens; identical to SEQ ID NO: 3125

SEQ ID NO: 3445 - DNA, 444 bp, Homo sapiens
  misc_feature (1)..(444): n=a,t,g or c
ttaaaaatactcctttttgtaagtctttattttttagttgctcctcccatagtaatgcactgaaaggcataacagtttatattgtacaaagcatttgaagaaagtacctcaacttgctgattatttcaaaatgagattacaaacaaaaagaaaacaaatctggttcctcaataaagggcaaaataactgaatacagtctgttatttacttctctcttttaacataaggttgggaacacttcattttacaaataggattaacatgaacataacatcgcacaagcttgcagacaaccagcataaaatatggagtacagtttttaatcagaagaatcatgcttccatgaaagaaattataatcgtttatacaattgaatcgatttcagtattacaaaaactaagttgcatctattcgtatttagttcattaagaaggaaaacnaaac

SEQ ID NO: 3446 - DNA, 381 bp, Homo sapiens
aagtattgttaacaatcctttggaagtcactactggtctttgtgtgctgctttttaataattgagttattttgagcttgccaagtaggatctattgcctggactaaaatttatttcctaatcttctgatgaccaagaaaggaaaaattaagtttgcagatgtgagatgaaatatagccagtgaatatgcatactgattctgaatgaaaggaattaacttttcagtcaagaaacagtctgcatgcagtaaattgaatttttcctgcaactggaatgatttgtttaattcttctttgaacactgccctttctccagtaagaacactaatgatttgctaatattttttaaagaaatcgtttttttaattagttaagctcagact

SEQ ID NO: 3447 - DNA, 292 bp, Homo sapiens; identical to SEQ ID NO: 3150

SEQ ID NO: 3448 - DNA, 427 bp, Homo sapiens
tttaacaggaagaaatatgccttttattaggagttgcatatgtacagagaaagctgtttctcacagctcaggggaggctgtgagaaagagccactgtcatccaaggtcactgcgcgtacactggtaacaccacttagacaccgccgcacgtgattaagaaacagaaccatgacacagaaatgcagaagagacacgggtacgtgtgtggacacatcatttctaaaaacaagtcaacacaaaaatacaatgtgccaataaaaaaaaaatagacatatccatacatgtctttttttctgtttttaaagtaaatacatggtatgctgagctttcacctccagctttttccacatcgggattcacaggcactttagcaccccagccatggtttacaatacaggatgttcagaacaatgaaggaagatgggag

SEQ ID NO: 3449 - DNA, 451 bp, Homo sapiens
tttccacaaaaatgtaatatacatttaatagcacattataaagttcctgaccaaagacgttgatttcctaattataatagcacagaaatcctttagaatttagtaaacgtaattaagactattcagaagtaatgaaaaaccaatatgataaaaacaaaaatcctccagtaaagaaggaacctgtccatttgagagaaatacaattgagaacttgcaaatgagacaagggaagatggcaatttggaactgcaatagaaataactatagcagaaacaaccatttaagaagttttagcagcaataagtatttattattctgaatgaaatgtacagttgacttttatataaaaatcatcaaaagtgctatattggattattttactattaatttaacccccaacagcatctattagctataactttaatgggtttttctttacttctgatacatc

SEQ ID NO: 3450 - DNA, 489 bp, Homo sapiens
ttttttttttttgaaaggaagcgagtaggttttaattcaagatacaggcccctcgcgttgatctcgtagaaggaaactcagtggactgacaagctcaagtcatgtatgaggcacgtcctgggacccccacccctcctgccataggaaggacagctttgggcagagggaaggaggtttgagatcagggttgggcccatacagattgtgtgaggtggtctcaagtacaaatacttatctgaggctcctgaacaggccagaaattggtgagtctcaagtaggtgtctggggaaagagagggaaggggcctgcctccgctccaggggagctggtcgccgtttggcaggcctaacagacctctaaggcacagactggtagcaggagagagctatgtcctgtactccagatgctgggtaaggagcagctggatgtgctcagatggggctcttctgagaaggtggaggtaggagagagggcagaagagagtaagcc

SEQ ID NO: 3451 - DNA, 439 bp, Homo sapiens; identical to SEQ ID NO: 2302

SEQ ID NO: 3452 - DNA, 378 bp, Homo sapiens
  misc_feature (1)..(378): n=a,t,g or c
ggatnagantttanaggcaagacatttattcactcatgatatatcagtgcaaagtgtgcctacagtatacaaggtaaactcacaactcatcaaaactaaaactttttacaatgtgcaatacatgtagggatattaattcaatatataaatgtcacatgtctcccaaatgtcacccaggctttctgttatttcttaaaatatacaagtcaatattaccagagaaaagataagaaaatcccattattttatcctaaacttatgtatacttctctaaagattcttagggcttgtaagcaatgaggtttaaggcnattttttaggatgttagcatcccggggctgacttngccgggctgtgggaaccccaggnccggagtgg

SEQ ID NO: 3453 - DNA, 476 bp, Homo sapiens; identical to SEQ ID NO: 3233
  misc_feature (1)..(476): n=a,t,g or c

SEQ ID NO: 3454 - DNA, 404 bp, Homo sapiens
  misc_feature (1)..(404): n=a,t,g or c
aacaagtttattttgcagttaggaaggtaacagggtagggcatggttacatgttccaggtncaacttcctttgtcgtggntgattggtttgcnctttatggggggggggtggggtaggggaaagcgaanagnaagtaacatggagtgggtgcagcctccctttagaacctggttacgagagcttggggcagttcacctgggcctgtgaccctcattttcttgacatcaatgttattagaagtcaggatattttttagagagtccactntttctggagggagattagggtttcttgccaagatccaagcaaaatccacgtgaaaaagttggatgatgcaggtacaggaatacacgagggcatagttctcatagtcggtggccaggatccagtacggtnccnatgg

SEQ ID NO: 3455 - DNA, 428 bp, Homo sapiens; identical to SEQ ID NO: 2941
  misc_feature (1)..(428): n=a,t,g or c

SEQ ID NO: 3456 - DNA, 396 bp, Homo sapiens; identical to SEQ ID NO: 3251
  misc_feature (1)..(396): n=a,t,g or c

SEQ ID NO: 3457 - DNA, 447 bp, Homo sapiens
  misc_feature (1)..(447): n=a,t,g or c
aactttactcataaaattttatttgaacaaaacaatttttganaatataaaaatttcataagaactgctttcctgttagatacaaaatttattttaaaaataaataattatattgacctttaccatcacttgtctaaattttactcatgtttattgtgaagacacagaggtgaattagaagagtatatcattatacattgtcaaataaagcgaaggtttccttatccaaatagagagaatatatatgtgattacttaatataaagcaaaagctatttctaccaaagaacagacatgcagttattgatctggaattggcatcgattacaaactactctngcaattcttcctctccccaattaaggtgtctctcttgaactggattgaaagctgtttgataagtatacttttttcaagatggtgtgcncagttggggggccttttatta

SEQ ID NO: 3458 - DNA, 268 bp, Homo sapiens
  misc_feature (1)..(268): n=a,t,g or c
ttttttttttttttttggcccaaagtaaacatgtttattctcagttctgccttaggggtctctagttttgcaagcatgagtaaatggantcaacaataatcctctccttaaatgtctggcattaaaatttgtcacttaagaagtttcctgttttgcctaaagagagtntgatttgagggtgacctgaaacaaggcttgaggcttntggacacatagggttaatcgccttatttcctgccaaatcgcagagcagtgaaaggccaaagga

SEQ ID NO: 3459 - DNA, 261 bp, Homo sapiens; identical to SEQ ID NO: 763
  misc_feature (1)..(261): n=a,t,g or c

SEQ ID NO: 3460 - DNA, 385 bp, Homo sapiens
  misc_feature (1)..(385): n=a,t,g or c
naatagaaatgattttttatttactttgatgattagggaaagataccaacatagctttcatcaaagctaacaaataactttactggcagttaactaattttattagactaaagacatgtctgtttaaactgaaacaactggccctttgctttggctgggaccttgggaatcacggccaaggtgctgatcagaaaagagtcaccattacatcaacctcctccccagcacacagcacagagatgccacgaaggccccatagggtccctaggaagagcagctgggggctccacctaccgaggtcccagtgggcttattttggaaaaggatttgctttccacagggtagggtgtcgcccgaggtacatttcttgaggacttgcccttgg

SEQ ID NO: 3461 - DNA, 384 bp, Homo sapiens; identical to SEQ ID NO: 3304

SEQ ID NO: 3462 - DNA, 566 bp, Homo sapiens; identical to SEQ ID NO: 292
  misc_feature (1)..(566): n=a,t,g or c

SEQ ID NO: 3463 - DNA, 446 bp, Homo sapiens
ttttaaaaaaaaactacatctctttattgcagaatttatacttgtttgaaaaatacaaaatgtagcgttgataagattgaagcatgttgaaaggtaagtacagggaaaggtcctttcagaatgactgcaacagtgcagcaaggattcccattccccgcctaaaggacaatacctttttaatagaaataaatgagttagttagttagatttttattacagattgaattaaacagttagttacaaagacattctctgatacattcattcatagaggtcttaacgtataaatacatagtaaatatcctataaaatcggtaggcaatctcatcgtgcattatctttttgtgctcagacttggacttcacattcagtctctacatacagcttgattagaatcataaaaacaatatgaagacgattgcataaaggggatagtttgaccaaag

SEQ ID NO: 3464 - DNA, 106 bp, Homo sapiens
gcaggtcagcaacaagtttattttgcagctagcaaggtaacagggtagggcatggttacatgttcaggtcaacttcctttgtcgtggttgattggtttgtctttat

SEQ ID NO: 3465 - DNA, 462 bp, Homo sapiens
  misc_feature (1)..(462): n=a,t,g or c
cataatccaataatatatttaataggtaagatctcattcatcaatatacaaaaaaaaaaaaacaaaccagaaaacaaaaaactaactttgattaagacatgtgcccttagtaaggnnctttacaattagaaaggtttatcggtagcactttgaggtagcatattttgtaaagtcacagggctgctctgcagtttctcctggatacaaaggtagaggccatcagcctttgcccctggaagaggaaagtgaaattatctgtactcattgccagtgtcagcctgaacacactttctaccacccacccttggccatccctcctctacactttatgcgtcgggggtttagaacaacgtaaaggcattttgctgcttctttcctcttggtacggcagcatcccaggctgtggagccagttgcctcttgccgcatgtgattcaccagcaggagacgcatgcaccctgtg

SEQ ID NO: 3466 - DNA, 319 bp, Homo sapiens
tttttttttttttttttcattttcattatgtagtttttattttagacgaacattattataaaaaaaaagttcacctggaataaaatccatttaaaaaaaacatagcatcagtatcagtacacagttaatgaattggcttaaacaagattaaccacatgacaggtccacttatctgcaggagcttttcacattaagccattggagcaaaaataaaatatgtttaaacatgtacagtaggatagttatatggaaaaactagagagtttccattaggggcatgattttcatcaaaagtttatggtattttgcatgaaaggaa

SEQ ID NO: 3467 - DNA, 203 bp, Homo sapiens
ttttttgtgataacagatcaattttaattctagcacctgaagctatacaagggtatgctctataaacttcatgggactgttgtacacacttgataaagtgacaactgtgcaataccacttagcatctcaaaatcaggaacatactattgaattgcttaaacacaatccacagaattaaaaacaaaatcagatgccatccacag

SEQ ID NO: 3468 - DNA, 309 bp, Homo sapiens
  misc_feature (1)..(309): n=a,t,g or c
ccccgtttaatatttatttatttaannttcataaacagngcactgcacctccagtgttcatccatggcactttcatgaccgcttcctgttctgtggcntctnttagtgccaagttgnatcacatttcttgctgaagttcagacaattgaaaacaaacagactcacatcctagggaaatcaacagaccaacaatggcaaaacacaatacaatgaaatggaaaataatgtttgttacaggagtgcagcaatttaagaagagtgtctcaggagtgtggctcactgggcagctgnagctaatgttaagtgctt

SEQ ID NO: 3469 - DNA, 281 bp, Homo sapiens
ttatacttatgattagttttattataaaggatacaaatcagctccacaagccaaggaagacacagggaaaggtctggaagggtcttgagcacagtgctcccatgccccctcttcgtggaattagggcacactgccctgccggcatagccacagcttcaccacccaggaagctatgctgagctttagtgtccagagtttttattagggtttcatgatgtactgattaaagcactggccagatgattaaactcagcctccagtcccccgccccataggtcagg

SEQ ID NO: 3470 - DNA, 284 bp, Homo sapiens
aagcttacactgagaatttattggagggctttgagacagctcatgtaatggaaagctcttaagaactaggtttagaaggtgcagagaccagggcaacttcagggatccaggtagcaggaaggaatcggtagcctctttggtatggccactatggtggtagacactgtctacgttgtttgctgagtcttctggctttcttccactcttcctgctcttggacatcagactccaggttcttcagcctttggaatctaggacttgcaccagtgggttggttgccaggg

SEQ ID NO: 3471 - DNA, 273 bp, Homo sapiens
aatggctattaaggctttattgtaagggattacagtaaaagatattctattgtgcaccatgcaagatgcagaaaataatggtttacaaataatgttaagcaaccaaggcaataatggttttcctttcattctggttttcccaaattaaatttttttttttcagattaaaatcaggtttggagttaacagaaaattgcattcctaacttaaaaacttcaacttctctagattcctttagaaaaggaataaatatagtttaaaaaaatgttgttt

SEQ ID NO: 3472 - DNA, 445 bp, Homo sapiens; identical to SEQ ID NO: 3160

SEQ ID NO: 3473 - DNA, 425 bp, Homo sapiens
tgggggtttttaaggtgccgcatgttctttttagtttccatacatcgtctgtcccagagtgaggagaagttgatctccttcccacatccaccggaggctgcgtgagggaagcctggctccccacaacttgctccttctccagccctgcccctctcaattaaaacaatgctttcttttttcttttcttttttttgagacggagtcttgctctgtcacccgggctggagtgcagtggcgcgatcttggctcactgcaagctccgcctcctgggttcacaccattctccagcctcagcctcccaagctgctgggactacaggcgcccaccaccacgccaagctaattttttgtatttttttagtagagacagggtttcactgtgttagccaggatggtctcaatctcccaaccttgtgatccacccac

SEQ ID NO: 3474 - DNA, 400 bp, Homo sapiens
caggattccagattttattttttagaagattgaaaaaacacacccaggacaacatttctttgatcaataaactttcaggaaatggaggaagctgttttgggacacattcaaagctagttaacttgaacttggaaatagggttttgacaatccaactatgggaaacaaatctctgaacaaattttaaatgaaacctcacccccccaaactgttcaagtggcagacaaaataaattaccataaattatatgccaacacaccttttaaaaaacaacaacagcaacaacaaaaacccaggagtctgaggatttccttagctcctccaggaagtgtgtaacactgcttctggcctgcaggctggggcggatcagggacctgtcacacgtcaggatagttgcagta

SEQ ID NO: 3475 - DNA, 470 bp, Homo sapiens
tttttcacaaataaaccaactttaatagatattattttgtatttatatagtgccttcttcaagaaccttaaatgctttacagacattatctctaattaatccccacaacaaccctgtgaggtaggtattactcccattttacaagacagggagactgaagcacagagaggttaagtgacttgcccaaggtcacacagttaaattcactgaagagccaggacatgagcgctttacctcccagctcccagccaaatacctcatgatagaatctttaataaaaagtgtttttaaagaaagtatcaagagtagttatgttatgaaaatgaggtctttctactgccatcaaggaaagaaaaaaccctatactgatggttagaggccccaagacccacataatacaacatttccctctttccctgttcccaagcctcctggttcctgtcttaaataatcttttaaaggtaaaattt

SEQ ID NO: 3476 - DNA, 428 bp, Homo sapiens
gtttgtaatcaatacatatttattgagtgcctactgtgtgccaggtgcaccacactagatgcaacggatactaacagtaaataagatacggtccctgccctcagagcttacatttcaacagtttaaagtgcatctcaggtatttcagataacagaagtaattctaccactctcaaatttttttttttaatgcaagacacaacacaatcataggccagagttataaaatacaatgttagaaagaaacgtttggtatcattcgtccagatcccattttacagaaaagaaactacaggagtggccatttgcacctatgttctgatttcaagtttggtgttttacccattgccaggcctctcataaaacaatattcagatttgccatgtatatatcaatatccaaacgctggtagtatacctgtgcagttgt

SEQ ID NO: 3477 - DNA, 425 bp, Homo sapiens
tttttttatcacccagtgtgaaaagcagattttatagtataaccgtttttaaatgaggggcctaagagagggcagtggctggttagtcctatgttagatattaacaaatacgtgtaggctggatgtggtaggtgacgcctataatcctcgcaccttcagaggccaaggtgggaggatcacttgactcaggagttccataacagcctgggcaacatagagtccgtctcctcacaaacttccattcttggctcaggtattagagtcaggtgccacaggtatataatgaaccggcagatctggagaggactgcggtgactgccccctcctcctcttgcacagcacataggaaagggctgcggtgaggatgaagatgatggccaggaggcacaggaccggcactgtggctgatgtcctggctgtgggac

SEQ ID NO: 3478 - DNA, 302 bp, Homo sapiens
acggattataaaagttatatttattcacgatgctacatttattgcattcccttagaaaaatggagaactgtttatgtacccaatctgcacatataaaattttatacaaattatgtgtagcacataaaggcctctggtacagctaaaatcctgacactataatttgggtattcctgctttagggtctccagtttatcaggtctgtccatagaaaacagaaactggaattatagtcagtcttgctaacacttagaaactactttaaaatacaataaaattttcatttaccctaaaagtccaaat

SEQ ID NO: 3479 - DNA, 260 bp, Homo sapiens
cacattaaattatttattgaacaaattgaagataatgacatatgtttttattacaaagtcttccatcatcttatatcattgacacatattatgagacctgcatttgaagagtgaatagaaataagaaaatgttttcccaaccccacaaaaacagaaaaaaatatattaattttataattatcttataaagccaaaagttttatgaattatactttttttattagttaaaaatgacagcataactaaggttaatttttatt

SEQ ID NO: 3480 - DNA, 544 bp, Homo sapiens
tttttttttttttttttttttgaaaagaaaatcagattggtttattgcttctgcttgtatacagagttgaagagcaagtttgagtgagtgcctggagtgggcggtggatgaggggaattatggaagggagaggggttcctcaagtctgttattttttaagagatggggtctcgctgtgttgcccaggctggtcttgaactcctgggctcaagcaatccacccatctcagcctcccaaagtgttgggattacagatgtgaggcaccgcacctggcctcaaatctgttcttgagcagtagagaggaaaggagaaaggaagggacccactggctaaaataaaatacatttttaagaagggcaactctcagtgagtggttgtgatggccgccctgctagggctcttccctcgcctcctggagctcctcccttcatcctctcctgtattgctgggcccagcctagtgtggaagaagagtaaagctgagctagaagtattttctgctggtgccccaccaatttaaacacattaaatttggagtgtagttc

SEQ ID NO: 3481 - DNA, 342 bp, Homo sapiens
tttttttttttttattatacaaattagtagtttatttcttcctttagtattacagttccaaaacgtaacttgaaggtcagcacaggagctgctgtgatataaaaggagagagtcacctggcgccccctgcagtcctccagttgcccagcagcagtgggacgctcagtggcacacagtgggtctctgtatggcctcccacctgcaagggcttccccgggcaggcccagctgccagaagccccggaacacacaggaagacaacactataggatggcaggtggggatctgtgcaatacaaacatgtagctagaaaacccaaccgaggatctgtctagaatacttc

SEQ ID NO: 3482 - DNA, 336 bp, Homo sapiens; identical to SEQ ID NO: 3182

SEQ ID NO: 3483 - DNA, 412 bp, Homo sapiens
ggagacaatgacaacggcagccgccattttattgccaatcagccatgagccccgccttccatacacaatgacatttcatccccacaatcgattaacacaaccatgatagccatgaactcccaactcctccagctgctagtgctcaacgggagagtcccctccaggtctgtctcattgcagagcccatattctttctgcccggccagcagttactctcctcaatgagcaggcactggtgcagtcttgggtgggcaccagtcacccctatggaaatccttgatggatgttacaggacaggattggatgtgaggggtcttggaaatggggctcaagaatcttcatcatgaggcgtttctgcgcctactgacctgagatacagagaggaagttccatggacaccaacacccagttc

SEQ ID NO: 3484 - DNA, 320 bp, Homo sapiens
aagcgaacaatttgttataatgaaccagaaatacaagattccactgaaactgaacagttgacagaatatggttgaacttaaaccttcaagggaaacaagggcaaaacaaagctaatgagtggaaaagtccaagattagtttgggataaacatgaggatataattgcattttagcatggctatcttctgacctcttccagcagttcgtctgccatcattctcccttctgacacacctaccaaatcaaatggcttctgatcctctatattgcagtataaaccaaccctatagtacccctctggtcatgatacaaacccagaa

SEQ ID NO: 3485 - DNA, 306 bp, Homo sapiens; identical to SEQ ID NO: 3196

SEQ ID NO: 3486 - DNA, 460 bp, Homo sapiens; identical to SEQ ID NO: 634

SEQ ID NO: 3487 - DNA, 425 bp, Homo sapiens
ttttttaaagtcttgcgtgaccacagactgccctttatacagaaagcagagtgaagcttcaaaagtaactgccagagaagtttttgtaccaagcttatgagtggatgggagtgttacttttctttaaatgaaaaatgctgaccaaagcctaatcggaaaaaaaggaaaaattaaaaataaaaacaaactgaaggatatatgccaagataaaccaaaattaatacagtgatcacagcacagttcttaaacaaaagtggcatacaatctaaaaatatctctttttctagaaatactattatgtaatctagttcaattatggaagcttttctgtcctgactctaaactgtctcctttattggatactctaattgcagtggcatacattcattttttttttgagatgggactcccttccttctgtagct

SEQ ID NO: 3488 - DNA, 483 bp, Homo sapiens; identical to SEQ ID NO: 959

SEQ ID NO: 3489 - DNA, 208 bp, Homo sapiens
  misc_feature (1)..(208): n=a,t,g or c
gaatttcactttagtttttattwnattgtaaaccattgvgatggaatgatagggtttcccagaatcaggtccatattttaactaaatgaaaattatgatttatagccttctcaaatacctgccatacttgatatctcaaccagrgctaattttaccyctttacaaattaaataagcaagtaactsggmtccacaatttataatacctg

SEQ ID NO: 3490 - DNA, 400 bp, Homo sapiens
  misc_feature (1)..(400): n=a,t,g or c
ncccttgactttatttatcttcataagncacaaaatgtgagtgcagagataaatgtctgtgtgcatgtgccctgagcaacagggtggcataactcggcacactcataatgacacagccgttcacccagccacagntagtgacagggcacacatggcgacacccacatgtacggngntaantctcccccaccatgacatgggtagacagaaaacacgccgcagtntactctagtntgtttacacaaacngggagacaggcccgtgcantgcatgttcaccaacacccacantcagngtgacatctgctggagggtgttcaggacacaggccacccaccgtggacatggccgagntttcacatttnttcacatggacacgggttggtttgccactttcantg

SEQ ID NO: 3491 - DNA, 341 bp, Homo sapiens
  misc_feature (1)..(341): n=a,t,g or c
gtgtttcagtatcactttaattgcagtatttaancacatcactttgtattcagaaaaaatatctacccaatactctctnctctggaaattnctatttccaaccgtcattgaaaccagggnccctgctcaacccctctggnaagnaatcaacagcaaacaaggncctgggtcacccacagaagaggcagctggttgataagggttaggngctgatctgggctatgaccatatgggggtgcagagcaagggaaggggctcagggtgagggaggcagagacagaaaagcatctgttgggggactgagggcaacagctcaacccaggggttcggcaggagggngg

SEQ ID NO: 3492 - DNA, 596 bp, Homo sapiens
  misc_feature (1)..(596): n=a,t,g or c
ctgtattatacgttgatacagtacactgccaggtgaaacaagagccttaataaagcatgcatcgcccacacccctgtatgagacccccacagaagggatcgcttgntaaggcaccattatgaaggtcaacagtgcattaacagctagaaaaccagaaattagtcctcaaggcataaataagagaaacatagctgcatgagaaaacagtttctaagcgttagtggttttatccacccaactgagaaaaattttaggttcttaagtctaatgaaacattagaccagcaattcccagccccagctttgtgacactcaatacgtgtccaatttcttctaaggggcatcacagaattctccaaaaagttaattcaaattcagaatcatttnaaaaataatcctgtgttggacaatgcctttctggaaggggagtgttacaaacttggagggggaaaaaaaattgtatattgccaggcccggntggctaggggggtccctgtnttagcagatgggatcttagctgctcattactgggatccgnatgcagtcctgacttaaaatggaaaggcttnagttccccggncatgcatgacttttgnt

SEQ ID NO: 3493 - DNA, 383 bp, Homo sapiens; identical to SEQ ID NO: 685
  misc_feature (1)..(383): n=a,t,g or c

SEQ ID NO: 3494 - DNA, 363 bp, Homo sapiens; identical to SEQ ID NO: 129

SEQ ID NO: 3495 - DNA, 239 bp, Homo sapiens
ttttcctagaaattggggcagagtacacccatttattggaaaatgagaagtcctgtgtgtgcagagaaattttaaagaaaagatcaggggataatccatccattaagaattctccattaagaatactcattataggtttaattaatcacaatgatggatatctttaacattaggcaataattgacagttttatagtggtgagactatcatcacccaaaatacaatttttaaaggtcata

SEQ ID NO: 3496 - DNA, 275 bp, Homo sapiens
taatgagaaaataactgtatacttgcattgaatgcctcacaatcactctaaaaccaaagcaggataataacatttaagtggttaacatacacaggaaaaccagatacagagtataatttccaaacacagtattgctgcttttttcccctcctcccccaaaaaaagaaaaacaaagaaaaaataatttgggtaaagagcaacacaaaatcaaaattggcagctcactgaatgcttaaaattcaggaaatttgttctttaactaaaatggaatatat

SEQ ID NO: 3497 - DNA, 209 bp, Homo sapiens
  misc_feature (1)..(209): n=a,t,g or c
ttaaaaacagaagcgcgaccatttctttattaaattatacaaatnnnnnngggaggggggcagctgtggggctcggcaacacccggccccaccccggcctggcgctgtctgagaagaggggatctgagggagatccagggatcaggcaggatagggatggggcaggacatgaggctgggggatgcanangttatttgggagangctacc

SEQ ID NO: 3498 - DNA, 423 bp, Homo sapiens
aatgattctcttcctttttcacaactgtgcagtcactgtcctattgtgttctattctgaaaaacaaatttttttgaaggtcaagtttttcaatggcacaaaactatttggaatgaacccaaaagatagcggaaagttgggtccctcctcaagtagtttcctcctcttttaacagcatctaactactctctatcaataatctcatcacagccgagttcttcggtcagacgattgacaaccatcagtgaaaaaagctcttcgataaaagctaactgatcaaacggggtcttctcataatgcatctgaaacccgccatccagggctggttctcttgttctcagaaacatcttgtcggcttcttcaagagcggctgatactctgtagccggcaccactgagctgctcctcttcgggatagtcgtagt

SEQ ID NO: 3499 - DNA, 305 bp, Homo sapiens
gtacaaaaaaaaagttttattttgaagattacagaacttgtgccatgaccccacctggcttccattcccagcaatccagggatctgtggtggggatgagagtgagaaaagggagtaggaggggaggagggaggcctggtgggggtggggaagtggagtaacatggttgttgagaagctcgtggccccctaggcctgggctcactgtctttactcctccatactacaagagtgatgaggaaggggatgaggcagatgggggctatgatcatggccaggagtacatcctctggggggtcagagaagg

SEQ ID NO: 3500 - DNA, 474 bp, Homo sapiens; identical to SEQ ID NO: 747
  misc_feature (1)..(474): n=a,t,g or c

SEQ ID NO: 3501 - DNA, 258 bp, Homo sapiens
  misc_feature (1)..(258): n=a,t,g or c
aaagattttattgtcttcttaagtcaatatccctggngaaantangnggataacttgaaactggtgacagtgcaacacagaccttcaggagctgctttgaaggactggcctgccagaatgcctgctgttaagcagcagccccctcactccggcccctgcatcttgacagatggagctgccatggtttcagggacactcagcagggatctgggttggtccctcccacatggaccttgtaaagttgctattcaggggacc

SEQ ID NO: 3502 - DNA, 464 bp, Homo sapiens
  misc_feature (1)..(464): n=a,t,g or c
ggtaggancagaatactttaataagataccagtgtcaaaatacattnccttataaagttaagcncccatacagttataatgttgtcagtaggaattcgacaatataataacgctcatgaaatcgttacgttgacaggtagggttaatatgaagcttggaatattttccagtgttttaggtaaaactgccaagggntaaaatgcccttaatgccggggcaacacacacagggaaatcaaataccaggcatttacacgtcgtaaacccttcaagttctggccacccgtgtggggggtaatggccgtgcggcttaaaatatggattttacggnaacaccatggactaggggaatttccttcatagggaactttaaattttctttttgganggctattttctctgtttttgggggcattaggtcttttccggggtttnactaanaggttgggggcccntgtggttttt

SEQ ID NO: 3503 - DNA, 469 bp, Homo sapiens; identical to SEQ ID NO: 3275
  misc_feature (1)..(469): n=a,t,g or c

SEQ ID NO: 3504 - DNA, 389 bp, Homo sapiens
  misc_feature (1)..(389): n=a,t,g or c
atcagntgttttntatctcttttattctgcttttttcctaatgtcataatccatttgactcctaagcatgtaagtaggtaccacggaatgtaaacaagtaaggaaacagaaataaactgaataatacgtggaaacaaagctgtgactcacacagatgaaatagctgcacaaaagaaataacatgaaaacatttaaaaagagacttaatgtagggaataaggctattttaatcaaggcaaaaacaaatttatatccattatttctaaaaataaaattaggacttttcccaatccttaacatctggcatttaataatatcttctaacccnaaatacaggtggctaaaacggccaggttaccttatatcttggtacnggcctaccggttggt

SEQ ID NO: 3505 - DNA, 145 bp, Homo sapiens
  misc_feature (1)..(145): n=a,t,g or c
tttnaagaaaaacnctagcacatttattgggagagtaagcctgggaaagactaagggagtggtggcagggagaaaggctgtggggantcagagcgggtnctcagttgggtcttgaaggagaagaggaggagggtgggaggtgggt

SEQ ID NO: 3506 - DNA, 359 bp, Homo sapiens
  misc_feature (1)..(359): n=a,t,g or c
acaacaaccctatgaggtaggtactattattcccattttaaagatgtgaaaattctatacagagaggttaagtaacttgcatcaagtcagagagttaataaatgagggagctgattaaaattcaggcgcctgggtacccaagttcctgttcttaaccactacactctaggcagcctctaagtttaggccctgcaaccagagttcctccaggggaagggaacgcttcagggtcatgggagaagttcaagggggaaaatatccaaatgggctctgtctccaaatggggggagatccctaagggggccagaggaagggtnagggccaaggggggaggccttccacttacagnggaggccagg

SEQ ID NO: 3507 - DNA, 252 bp, Homo sapiens
  misc_feature (1)..(252): n=a,t,g or c
cagattcacttcacttttattatgaacaaacacaatctcagattagtacaattagcttcagagttgatattaatagaaattattccaaatttatccttgtcacaagtaactactatatcccacataaaaggggaaaaaagcccacccaatcacagaaatgaggcatccccggtatgtttccggggcaatgcgttgtttatgtattgcccaaatttngtctggctagttatccaccgcttctccaatggattc

SEQ ID NO: 3508 - DNA, 299 bp, Homo sapiens
  misc_feature (1)..(299): n=a,t,g or c
tttctgagacactgtcgatttattttagcatttacatttgacattcatttaacagacacacaaggcaagccaacaggtaaacatgcttacacagcctgcagaaatcgccaggttttancttgttttttaggaaaacaaccaaaacacccaaaatttaccatgacccggtacaggaaaaacaggaggactcaagtgattactagagctgcaagtgtttcttagaattgaaccaaaaattgttttttcccaactggttcaaatttcctctaagtgcaggtgagaaaaaaggcaattatatt

SEQ ID NO: 3509 - DNA, 349 bp, Homo sapiens; identical to SEQ ID NO: 3286
  misc_feature (1)..(349): n=a,t,g or c

SEQ ID NO: 3510 - DNA, 338 bp, Homo sapiens; identical to SEQ ID NO: 3287
  misc_feature (1)..(338): n=a,t,g or c

SEQ ID NO: 3511 - DNA, 460 bp, Homo sapiens
  misc_feature (1)..(460): n=a,t,g or c
tttttgggtggaagggtgagccantgtntttttttaattttaatttttaaaaaatttaaaaaattccctattcaaaggtcaaaaagccacataagttttgatgatgatcattttgaacggaggctcgagatggactgagaggactgagacacagaagtggggggaccatggtttttactggctggaccacagggggaccctntccacccgcctggnttgaggaaggtttctggggtgctcaggtgggtttnttctcagcaatgcaggcatagtcagctcttgggatcctccttgggngcctctcttgtctctgcccctgaggtcaggtccctcactgctgggcactggcagcctctgcagagaatgcaatagtgggagttcctgctctgaggaaccctggggncccagntccttttccagcctctttaaaanattccgcganaaacatttaggnaagggt

SEQ ID NO: 3512 - DNA, 302 bp, Homo sapiens; identical to SEQ ID NO: 3302

SEQ ID NO: 3513 - DNA, 408 bp, Homo sapiens
tttttttttcagatcatattcctttattacatatatgaaatataaaaacaaattaacaaagcaatatatatatatatttgcaagtccacaggcttcagagaaaaaaaggttctgtatgtgaaattattcatatggcactgtgttcatgttttgtatattcaagtacaaaagaaactatgtatagtggttatgcgtgggtacagaagatgaataataatgaaaaactgtgattttttgactatcacatacattgtgttaaaaaacaggtaaatataatgactattactgttaagaaagacaaggaggaaaactgtttcaatgttcaggtttaaatactaagcacaaaaatataacaaattctgtgtctacaataatttttgaagtgtatacagtggcattgccaatgga

SEQ ID NO: 3514 - DNA, 532 bp, Homo sapiens
tttttttttttttttgaacagagacccaaaataattttaatgcaaataacaaaatgagttagtctgtctccatcacatagcccctcaatgaaagaattacagtactttataaaaatgtcataaaatgcgcaaactacagttccttcaaatacagttgatgctatctttggtcctaatatgtgcttcttggatgtctactaattttgttgttgttattgttcttgaataactggtaataagcaccaagtgacgggctgattctatctacaggtaagaagcttggatgttttctccctgattttgtcatttctttccaacttcccaaatgcatgtcatacagcagggaagaggcatctctcatgtctcaaaaaagcttaatggcacagatggatgtgggcactgaatgttgtacagtagtgggcaaccagccgggaaaatccataggatcatttcagaccgcattcaacacagatactcatgtagccccgacgtttcttgtgaagggaattgatggaatgcctgagggggtcga

SEQ ID NO: 3515 - DNA, 467 bp, Homo sapiens; identical to SEQ ID NO: 2014
  misc_feature (1)..(467): n=a,t,g or c

SEQ ID NO: 3516 - DNA, 282 bp, Homo sapiens; identical to SEQ ID NO: 3311
  misc_feature (1)..(282): n=a,t,g or c

SEQ ID NO: 3517 - DNA, 198 bp, Homo sapiens
atattcttaaatctcaaatgagatttatatattttaattaattaacacacttgttttgaatacatactatgtgccaggctctctgctagctactagaaaacaaattacaaaaacaccattcacttttctttaaccgtaacttattgaatgctataattggaagtgagtgtaaaagtgagtgtatatgaaataaaccat

SEQ ID NO: 3518 - DNA, 466 bp, Homo sapiens; identical to SEQ ID NO: 652

SEQ ID NO: 3519 - DNA, 1622 bp, Homo sapiens
ggccggcggcagagctgtccggctgcgcggtggcccggggggcccgggcggcagggcaagcagcgcggcctcggcctatgcgaccggtggcgccggcgcggcttctgcctggagaggattcaagatgaccaacgaagaacctcttcccaagaaggttcgattgagtgaaacagacttcaaagttatggcaagagatgagttaattctaagatggaaacaatatgaagcatatgtacaagctttggagggcaagtacacagatcttaactctaatgatgtaactggcctaagagagtctgaagaaaaactaaagcaacaacagcaggagtctgcacgcagggaaaacatccttgtaatgcgactagcaaccaaggaacaagagatgcaagagtgtactactcaaatccagtacctcaagcaagtccagcagccgagcgttgcccaactgagatcaacaatggtagacccagcgatcaacttgtttttcctaaaaatgaaaggtgaactggaacagactaaagacaaactggaacaagcccaaaatgaactgagtgcctggaagtttacgcctgataggtaaacaaatcatactccccagtcaagacttccctgacagtcccactacgagaaagctgtggtgggacagccaagtactcgtttccacaccaagactcagactttttgagccaaaaaaaagccacattcttacactgtccagcttgtaatggttaatgtaaaacttaccagatgaaccttgtgtttcagcttttttcttttccccttccccttgcttcagaggcctgatggcgtcggactattccgaagaagtggccacctccgaaaaattccccttctagaacatgtagacacttgagaaatgtttctgtttgaagaaaatagagggagaaacagaagtcttaagtctgtggcacactgtgtcttcagacagtttgaaggaatgaaaacctagagattttaaatcatgaattgaacatgtaaaattccagtaaaatgtaaaaacggaatatgcatcgctcttaaccttgagcatagtgacttagagacactgtgtatcagttttgccaataagactgtggacttcatgattgttgttgaacttctgggtcaaaactcaaatgaggtgaattttgcctttaaagggtttatttgctgagaaccaactttcaatagtcatgagagaatcaaataatagatgtccgtacaagtagcgcatatatttaaccatttagtttggggctctatattacttgcttgagccttaatcaatgtggttttattcaatggtttgttctttgaatggttgcaaaaactgtagataatcttactgaggactgtacaaacatgaaggtgtggtatcaaacttcaggttgaaactgtttgaagcattataaacattcatttcacaactagattgtataaggatattagctgtgatgagactcactgcattattttttttagtgaattttatgaaatccccgttccattcaacaggcacatgtttaaaagagctttgtcgttggtgttaatgggggaatgtgttccttcattgtatttgggccttttgtattgcactcttgatattaaattaaatgtgcctt

SEQ ID NO: 3520 - DNA, 4859 bp, Homo sapiens
cacgttgggtgacataatggggtttttttaattatagattcacactgcatttattcatcacccctgtcctctcatccataactcaaatttactaccagcaacacaaaatacaaagatgtgtccagtttcactacagctcttcgcgtttacaagtgtcgagcgcttgctttcggaacgcccttgtgattggccgagccaatgccagtgacatcaaccaacttacttttgattggaaggctggttgctgggactgtagcgtttgcaggaagtcacttaactgtttgggagctggaaaaccgaagctgaagttctcttttgccataggaacgagcgcaactgactaggaaagatgtgtcccaaagctccgcaagctggaacgtgagccaggaggcccggaccggccacgggaccgcgaggcactccgaaagtgtgcggctgccccttccctgcctcccagctgttacccttttaaatgtcagtgttcgaggctgtaggggtagcacgaggcagcgaaacggaacagtcggattggccgcacgcctcagttctagacgcacctctccaccgaagccgttctgactggcagggggagaaagtaaacagagttgaatcaccctccccactggccaattggagggggtttggtttgtgacgtgatgggattctgcgaaattgttactgagcaagagaatgccggaacgtgcggaccggccggagcaggggttcagaagccgtcagtggactcgggaaaaagtgtctcttagacctggcgctcggcggggccctcgccacccgcgtcggggtgatcgggtgaatgtcctggggctttggctcgacggcgaggcggccgagggcgtgcacctctcttgcagtttcctctcccagcgcctcgggggcgttttcagtcgaataaacttgcgaccgccacgtgtggcatctttccaagggagccggctcagaggggccggcgcgcccgtcgggggatcgcggccggcgcggggcaggggcggcggctagaggcggcggcgcggcggagcccggggccgtggatgctgcgtgcggaggcgctgccggttacgtaaagatgaggggctgaggtcgcctcggcgctcctgcgagtcggaagcgccccgcgcccccgcccccttggccgccgcgccgtgccgggcgggcgggtcgtcgtccgaggccagggagggcgagccgaacctccgcagccaccgccaagtttgtccgcgccgcctgggctgccgtcgcccgcaccatgtccgcggccgcctacatggacttcgtggctgcccagtgtctggtttccatttcgaaccgcgctgcggtgccggagcatggggtcgctccggacgccgagcggctgcgactacctgagcgcgaggtgaccaaggagcacggtgacccgggggacacctggaaggattactgcacactggtcaccatcgccaagagcttgttggacctgaacaagtaccgacccatccagaccccctccgtgtgcagcgacagtctggaaagtccagatgaggatatgggatccgacagcgacgtgaccaccgaatctgggtcgagtccttcccacagcccggaggagagacaggatcctggcagcgcgcccagcccgctctccctcctccatcctggagtggctgcgaaggggaaacacgcctccgaaaagaggcacaagtgcccctacagtggctgtgggaaagtctatggaaaatcctcccatctcaaagcccattacagagtgcatacaggtgaacggcccttcccctgcacgtggccagactgccttaaaaagttctcccgctcagacgagctgacccgccactaccggacccacactggggaaaagcagttccgctgtccgctgtgtgagaagcgcttcatgaggagtgaccacctcacaaagcacgcccggcggcacaccgagttccaccccagcatgatcaagcgatcgaaaaaggcgctggccaacgctttgtgaggtgctgcccgtggaagccagggagggatggaccccgaaaggacaaaagtactcccaggaaacagacgcgtgaaaactgagccccagaagaggcacacttgacggcacaggaagtcactgctctttggtcaatattctgattttcctctccctgcattgtttttaaaaagcacattgtagcctaagatcaaagtcaacaacactcggtccccttgaagaggcaactctctgaacccgtctctgactgttggagggaaggcaaatgcttttgggttttttggtttttgtttttgtttttttttctccttttatttttttgcgggggagggtagggagtgggtgggggggagggggtaaggccaagactgggtagattttaaagattcaacactggtgtacatatgtccgctgggtgagttgacctgtggcctcgcacagtgattctaggccctttatgcttgctgtctctcagaattgttttcttaccttttaatgtaatgacgagtgtgcttcagtttgtttagcaaaaccactctcttgaatcacgttaacttttgagattaaaaaaaaaaacgccatagcacagctgtctttatgcaagcaagagcacatctactccagcatgatctgtcatctaaagacttgaaaacaaaaaacagttacttatagtcaatgggtaagcagagtctgaatttatactaatcaagacaaacctttgaaaggttacactaagtacagaacttttaaaccttgctttgtatgagttgtactttttgaacataagctgcacttttattttctaatgcagaggatgaataagttaaatacatgctttgaggatagaagcagatgttctgtttggcaccacgttataatctgcttattttacaatatacacgtttccctaagaaatcatgcgcagagatgtgagggcagaatatacacaacagatgctgaaggagaaggagggtagtgttttgcaaaagaaaaagaaaagaaccaacagaattttaactctattaacttttccaaattttcctatgcttttagttaacatcattattgtatcctaatgccactaggggagagagcttttgactctgttgggttttatttgaatgtgtgcataacagtaatgagatctggaaacacctattttttggggaaaaaggtttgttggtctccttcctgtgttcctacaaaactcccactctcaggtgcaagagttatgtagaaggaaagggagctgaaataggaacagaaaaatcaacccctataactagtgaacaccaagggaaaataccacaatgatttcagaggagactctgcaaaatcgtcccttgtggagaatgcaggcaacatggaatactacgaatgaaatcacatcactgtatcttttacatcaatagcctcaccactaatatatcttgtatctaggtgtctataatggctgaaaccactacatccatctatgccatttacctgaaaacttaactgtggcctttatgaggccagaaaagtgaactgagttttgtagttaagacctcaaatgaggggagtcagcagtgatcatgggggaaatgtttacattttttttttcttcagaagtaacgctttctgatgattttatctgatatttaaaacagggagctatggtgcactctagtttatacttgcgctctgaaatgtgtaaacatagggtgcctacctatttcacctgacccatactcgtttctgattcagaatcagtgtgggctcctgcagtgggcgcgggtcacggctgactccaacttccaatacaacagccatcactagcacagtgtttttttgtttaaccaacgtagtgttattagtagttctataaagagaactgcttttaacattagggactgggagcagtccatgggataaaaaggaaagtgttttctcacgagaaaacatgtcaggaaaaataaagaacactttctacctctgtttcagatttttgaaacacttattttaaaccaaattttaatttctgtgtccaaaataagttttaaggacatctgttcttccatacgaaataggttaggctgcctatttctcactgagctcatggaatggttctgcttatgatactctgcacgctgccttttagtgagtgaggagtttggggttgcctagcacttgctaacttgtaaaaagtcatctttccctcacagaaagaaacgaaagaaagcaaagcaaagtcagtgaaagacaatctttatagtttcaggagtaaatctaaatgtggcttttgtcaagcacttagatggatataaatgcagcaacttgttttaaaaaaatgcacatttacttcccaaaaaagttgttacttgccttttcaagtgtgacaaactcacatttgatattctcttatatgttatagtaatgtaacgtataaactcaagcctttttattctttgtgattaaatcctgttttaaaatgtcacaaaacaggaaccagcattctaattagatttactatatcaagatatggttcaaataggactactagagttcattgaacactaaaactatgaaacaattactttttatattaaaaagaccatggatttaacttatgaaaatccaaatgcaggatagtaatttttgtttacttttttaaccaaactgaatttttgaaagactattgcaggtgtttaaaaagaaagaaaagttgttttatctaatactgtaagtagttgtcatattctggaaaatttaatagttttagagttaagatatctcctctctttggttagggaagaagaaagcccttcaccattgtggaatgatgccctggctttaaggtttagctccacatcatgcttctctt

SEQ ID NO: 3521 - DNA, 419 bp, Homo sapiens; identical to SEQ ID NO: 3212

SEQ ID NO: 3522 - DNA, 5047 bp, Homo sapiens
ccgttgctgtcgccgttgctgtcgggggcgctgtgcgctgaggaaggcgcgggcgagccggagcagaagaaggagggagggagccagccgctgcagccaccaccgccaccatgtcctaccaaggcaagaagaacatcccgcggatcacgagtgaccgtctccttatcaagggaggcagaatcgtcaatgatgatcagtccttttatgctgatatttacatggaagatggcttaataaaacaaattggagacaatctgattgttcctggaggagtgaagaccattgaagccaatgggaagatggtgatccctggaggcatcgatgtccatactcacttccagatgccatataagggaatgaccacagtagatgacttcttccaagggacaaaggcggccttagcaggtggcaccaccatgatcattgaccatgtggtgcctgagcctgagtccagcctgactgaggcctatgagaaatggagagagtgggctgatgggaagagttgctgtgactatgccctgcatgtggacatcacccactggaatgacagcgtcaagcaggaagtgcagaacctcatcaaggacaaaggggttaactccttcatggtttatatggcttataaggatttgtatcaagtatctaacacagagctctatgagatcttcacctgcctgggagagctgggggccattgctcaagttcatgctgagaatggggatatcattgcccaggagcaaacccgcatgttggaaatggggataactggcccagaaggccatgtactgagcaggccagaagagctggaagctgaggctgtgttccgtgccatcaccattgccagccaaaccaattgccctctctacgtcacaaaggtcatgagcaagagtgcagctgacctcatctcacaagccaggaaaaaaggaaatgtagtctttggtgagcccatcactgccagcctcggcatagatggaacccattattggagcaagaactgggccaaggcggctgcatttgtgacatccccacccctgagccctgacccaactactccggactacatcaactccttgctggccagcggggatctgcagctatctgggagtgcccactgcaccttcagcactgcccagaaagcaattgggaaggacaacttcacagccattcctgagggcaccaatggtgtggaggagcggatgtctgtcatctgggacaaggctgtggccacagggaaaatggacgaaaaccagttcgtggctgtgacaagcacaaacgctgccaagatcttcaacctgtatccccgcaagggaagaatatctgtgggttctgacagcgacctcgtcatctgggatccagatgctgtgaagatcgtctctgccaagaaccaccagtctgcggcagagtacaacatctttgaagggatggagctgcgcggggctcctctggttgtcatctgccagggcaagatcatgctggaagatggcaacctgcacgtgacccagggggctggccgcttcataccctgcagcccgttctccgactatgtctacaagcgcattaaagcacggaggaagatggcagacctgcatgccgtcccaaggggcatgtacgatgggcctgtgtttgacctgaccaccacccccaaaggtggcacccccgcaggctctgctcggggctctcctactcggccgaacccacctgtgaggaatcttcatcagtcgggatttagcctgtcaggcacccaagtggatgagggggttcgctcagccagcaagcgcatcgtggcccccccaggcggccgttctaatatcacatctctgagttaagcaagccttcctcaaagagaggggcagaagcaagaagagattgttttgaagccaaaatggtacaccgatatttaagaaggaaagcgaatccaaacggttgtgatctaaagaatcaataagcctcaagccttatgtttctccaatgttacgctcgcttgcctagctttacgaatattgctttgttttctgtttatgcatagccttgatttgtttgactcccctccccccatttacatgcatgcaatcagacaggccactaaggtaaaagagtctgctctatcatagtgttgagagcgtgtgtagtgctgcatcttatgacaaggggacagacaagctgggacgtcagggaaatgaacaaaagggacgcaggttatttggggtgagtgggtggtgggagcctggagcaaggtggagggtgcagaggggctggggtagggcatgtaggagggaggtgggtgggtcaggtgagtggaaggggtgttgtatattgtgttgatgacgtacgttatttccatggaagatagccgctgtggcagctgtcacatcaccacagctccctagggtctgccgagaaggcaggcagtctttgggttctgttctttgtcacgtcccctacaagtaaattttgtttctttgaacgtttattaaaatgccaagacccaaccatttcttccacctgcttgattgtgccagtgtttgctcaggcctctttcttagtgttgctttcaaatccttctctttcctgggttgggaaggccaggcagggacagagcaaatgacacttctcttcctcttgccctccctgcctctttggtgctcttaaaagccagcagctgagaacatagcacaggcccacgtggtgagggcacccacagcttaaagacgcttccttctaaacacggcgaggtcacctctcactcttctgtctttgcaaaccgagaagagtggcatgcttctggcatcccaagtcaggattttagctcagatgaggcagaatgaagggcctctcttacaggcagtttgtgtttgattctctcgatcctggcacatccatgataaataggagtttttgaaagttggttttattaggtgttccctaatttttaccgtaataggtcatctcagcttatatgaaagtcaagtggggaactgggaaagccaaagtcagtcttgagcagagggagcacattttgtggacctggttccacctttccattccaaaccacctgtttccccttccattagcagaaactctgggggaactttgtgtctcagtcctagaatctccccaagtgagtggaagtgacatgatgcagtcttcctcatggggcacctgaaagaaattagtgtgggtgcttcgatctaccttgtctgtcagagttgaatatctctttccctatcatgctgcttctgaaaattcagttttggagcaagtcctgtgagcaagataagaatctatagaaccaagatgctcattttcagaagaaatatgttcaacctgggatcagacttccatgctctggggaatccaagtggtagcacctgtaaccctgtgtactaagtgctttgaagagaagagcaggcctcagacaccttttaattgcttaggagaaaccattgtctctgactgcaggtttgaataagttgaagaccagagaaaagtacacactgggctacaaaggaatttggagatagccaaggaacaggatttcccctagcaagctaccttctgttcaaatcatgaaaaaagactatttccccttagaatagggaagcttgctattttaaagctcttgtagtgcttttcttttaagggagatgtagtaaaagggaaaatgtagctcttagtttacacttcaaagatgtgggggtctttcagagaactaagaataacagttttatgtgcagagagagtttgccagatctgaagcatatacctcattgactaggctgttactttgggataggttgcagtaccagccacagccagcagatagaggaaaagacacacataaactcgcttctgagcgtccacttctgcactctctgctctgctgttactcagcccctgagtctgactcatctctgcacaacctctctgtgccatgaagataagtcttccatggccaaatcggtcatccgcactgcccttgggacttccgaagtgaaccattccaccagaacctttgattctgcacaagatttccttgctctgggaacaacccccaaatgcccttgggaggaacaacatgagctcaggaagcctctctttcttcacttaccattactaactctccaagcatagaaatccctgggaattgcgagaataactcccactattttaaaatttatattcagatttgtttcgtttcataagacacatcaaacaggcctatacaaaaggtttaggaaaagaaaacaatggtgagtcccggccctcttcgaattcactggcacctcatgcaagtgtaggaaggcacgctggatcgtctatctgattccaaagctgtcctttgccatctcatcccttggcctgccccccaaccctgaggatgcccctgccatccccccaacctcctcatattgcctctgaacccagatggcaatccatcccggttctctctgagggccacgggcttgggtagtggaaagggtgtttgggaaattgttaaatcagttacccgtagtagagctatttcttgtacttctaagttttctagaagtggaaggattgtagtcatcctgaaaatgggtttacttcaaaatccctcagccttgttcttcacgactgtctatactgagagtgtcatgtttccacaaagggctgacacctgagcctggattttcactcatccctgagaagccctttccagtagggtgggcaattcccaacttccttgccacaagcttcccaggctttctcccctggaaaactccagcttgagtcccagatacactcatgggctgccctgggcagccagcattcattgtaagttccctctttgaaaactggtgtgtgggtgttcagttctgtgtctggtgggtatggacagacagtaatctcctgtgatctgtgctagctgtgaggcagctctggaacgtgaagagctgtttggtttgaaccgtgaacaaaactgtgttttgagtttagctgacattaaagaaaaaagttcatcacgtgactgttaatgtaaacctggttattaaaataactatgaaattac

SEQ ID NO: 3523 - DNA, 5426 bp, Homo sapiens; identical to SEQ ID NO: 103

SEQ ID NO: 3524 - DNA, 3184 bp, Homo sapiens; identical to SEQ ID NO: 105

SEQ ID NO: 3525 - DNA, 6047 bp, Homo sapiens
cccggagcccaccggccgcaggtgcctcctccggccccagggggccccgggagccctgaagggcgaagcggcagggacgcctctcttgggcgaagaggcggcctcaccgccccggatgcggccggagggcgcgggaatggagctcggaggcggcgaggagcgcctgcctgaggagagcaggagggagcactggcagttgctgggtaatttgaagacgacggtggagggtttggtatcaaccaacagccccaacgtctggtctaagtatggtggcttggagcggctttgcagggacatgcagagcatcctctatcacgggcttatccgtgaccaggcgtgccgccgccagacggattactggcagttcgtgaaagacatccggtggctcagtccccactcagcccttcacgtggagaagttcatcagcgtgcacgagaacgaccagagcagtgctgatggtgccagtgaacgtgctgttgccgagctgtggctgcagcacagcctgcagtaccactgcctctcagcccagctccggcccctgctcggggatagacagtatatcagaaaattctacacagatgctgccttcctgctaagtgacgctcatgtcacggccatgctgcagtgcctggaagcagtggaacagaacaacccccgcctcctggctcagatcgatgcgtccatgtttgccagaaagcacgagagcccgctcctggtgacaaagagccagagcctgacagccctgcccagttccacatacacccctccaaacagctatgctcagcattcctactttgggtccttctctagcctccaccaatccgtgcccaacaatggctcagagagaagatctacttcctttccactctctggccctccccggaaacctcaagaaagcagagggcacgtctcaccagcagaggatcaaaccatccaagcccccccagtttcagtctctgcactagccagggattcccctttgaccccaaatgaaatgagctccagtactctgaccagccccatagaggcatcctgggtcagcagccagaatgattccccaggtgatgccagtgaggggcctgagtacctggccattggcaacttggacccccgaggccggactgccagctgtcagagtcacagcagcaatgccgagagcagcagttccaatttgttctcctccagcagctcccagaagccagattctgctgcctcttccttaggggaccaggaaggaggtggggagagccagctgtccagtgtcctccgcaggtccagcttctcagaggggcagacactcactgtcaccagtggggcaaagaaaagccacattcgctcccattcggataccagcattgcctccaggggagctccagaatcctgcaatgataaggcgaagttgagaggccctttgccctactctggtcaaagcagtgaagtcagcacacccagctctctgtacatggaatatgaaggtggtcggtacctgtgctcaggggaaggcatgttccgaagaccatcagaaggacagtccctcatcagctacctctctgagcaagacttcggcagctgtgccgacctggaaaaggagaatgcccacttcagcatctcagagtccttaattgctgccatcgagctaatgaagtgcaacatgatgagccagtgcctagaggaggaggaagtggaagaggaagacagtgatagagagatccaggagctgaagcagaagatccgccttcggcgccagcaaatccgcaccaagaacctgctccccatgtaccaggaggctgagcacggaagctttcgggtcacctccagcagctcccagttcagctcacgtgattcggcacagctctctgactctggctctgctgatgaggttgatgaatttgaaatccaagatgctgacatcagaaggaacacagcctcaagcagcaaatccttcgtttcctcccagtccttctcccactgcttcctgcactccacgtctgctgaggcggtggccatggggctcctgaagcagtttgaggggatgcagcttccagccgcctcggagctggagtggcttgtcccggagcatgatgcccctcagaagctcctgcccattcctgactcactgcccatctcaccggatgacgggcagcacgctgacatctacaagctgcggattcgtgttcgtggcaacttggagtgggccccgccccggcctcagataatttttaatgttcatccagccccaacgaggaaaattgccgtggccaagcagaattaccgctgtgcaggatgtggcatccggactgaccctgattacatcaagcgactgcggtactgtgagtacctgggcaagtacttctgccagtgctgccacgagaatgcccagatggccatccccagccgggttctgcgcaagtgggacttcagcaagtactacgtcagcaacttctccaaggacctgctcattaagatctggaatgatcctctcttcaacgtgcaggacataaacagtgccctctataggaaggtcaagctgctcaatcaagtccggctgctgcgggtccagctgtgtcacatgaagaacatgttcaagacttgccgactggccaaggagcttctggattcctttgacacagtcccaggccacctgacagaggacctccacctgtactcactgaatgacctgactgcgaccaggaagggggagctggggccccggcttgctgagctcaccagggcaggggctacccatgtggagagatgcatgctctgccaagccaaaggcttcatctgtgagttctgtcagaatgaggatgacatcatctttccctttgagctccataagtgccggacctgtgaagagtgtaaagcgtgttaccataaagcctgcttcaagtctggaagctgtccgcgctgcgagcggctgcaggcccggcgggaggcactggccaggcagagcctggagtcttacctgtcagactacgaggaggagcccgcggaagcgctggccctggaagccgccgtcctggaggccacctgaagaaagcacgtgcagccctccctccgggccgggtcacacctgttgcagaactgagccactctttgaaggactcgccccacctggggcttcttttttttttttttttttaattatcatcatcttttttttttttttactgacttgtctgacgtctgtgtgcagtcagccgtcggcaggttgatgggtccagagtctgtggtgacagataatttgtaaacaccaggtgtttccatcagaactgacatgcgggtccttcagtgaagcttctagtgcctctgtcagtggaagagacagcaagaccaagttcttccagcgtctgtggccttctcctctaggtttcacctgcatgtcaggtatcatttccaattttcctttgtttcagttctggagcttctgagccaggcctttctcaaccacctctcctgctgctgaaacggggatggcgttttccctctccctgtcctggactggggtcagactgtgccccgaggagaagcagcagagaataggactacgtcatgggcatttcgtccacttatttgggtattttgggggccacagaacaatcctgactatcctagactcctcagagacctcagaggcagctgtgaatgtccctatgttgccgggagttcctgtttgaaatatttgaagcatagaggatgccacaagctgactttcttcatctaccttggtgatcttgaagcaaagaacagaactgatgctcaggccaggctcacctgtagccttacgccgcaagcatacgtgaggcgccagctctgtcgctgaaggagcgcttactcagaggagcggtcggccccctcttggtgttaaggtctcttagttaacctggctttttggtgcaggtgtgatctttgaagctcaggcaggtccctgatgccatcctaaggtgaggacaggaacctcacccaccatcttcttagcgtgtccctgatgactctgtcctctgttagatggtcgttgtgcttctgagtaaaagtacaacccgactccgttctctccccttcctgcagcagagctgggtccttccctggtggccgagtctctcttgccttagcttctttggtcaaagttggagaaaagcttcctgctattagtgctgttacagaacttgacggtttgtggatgtgagtgtgaatgtccctgtgttcttgggataacaagagcctttatgccaattatgcacttaactctgtgtagcctggtaatgtttatctgttcatttgataatgctgattttagtgtgctgcccccctccccccgttaatgtgtgttgatggtgaagtccttttgataatgctgattttggtgtgctgcctcccccttcccccccgttaatgtgtgtgttgacagtgaagtccttgggtggggccatgtgtgtgtttgtgatgttccttaagttgatgcagcttctaacctctgtgaaaacactggtcagagtggcttctccaagagctggcagctctgtgaactaaagcctgcatcatttttgttctgggattgaattctgcccatgggcatgtcttctcatagttgcttgctggtaggaaagaaatgggcgtgggtgctgccctggaagctgagcggaaagttgcctgtggttggtggaagctgatgagagcttgagctggcggtaagaaggagtctcccagggaagtgggagaggcattaaggtgatggccagggctgaggctccaccagcgtgagagggaacatgtgggaactggcccctgcccttgattcctctgcctcaaagttgggatctgaaagccatgtagggctagaagaccctgaggctgttctcccttctgttcatagtgagactcaaaaagccaagtcccagaagttctgaagggctgtgactagaagtgcccaggtccttcagggagctttaagaatgaccccacagaactcaagtttaactaggggttaggtcccagattcagacccaggagtttataaaaatgagctctacttccagttttggtttaaattacacatccaggccaggcacagtggctcacacctgtaatcccagcactttgggaggccagtgcgggcggatcatgaggtcaggagtttgagaccagcctggccaatgtggtgaaaccctgtctcttccaaaaatacaaaaattagctgggcgtggtggcacacgcctgtaatcccagctacttgggaggctgaggcaggagaatcgcttgaacctgggaggcagaggttgcagtgagccgagattgcgccaccgcactccagcctgggtgacagagtgagactccgtctcaaaaaacaaaaaggtgacacatccagctctttctccaggtcactgcgctggaggacagatgtgccgtcttgtcctgcctgtttcacatcagcataggatcaaaggatgacaatgctgacagcttctgaagccgaactcaacagtctcataggctcctcacttgtcacttatttttccctagctccctcaaccgcaccccatccctttagatcgtgcgtctgttttagtgactctgacacgatgccgtcctcaccttccaaatacccagttatttattcaagaggggggaagtgggtagaggatgggatgttttggaagcactttgcaagttaccactatctgaaaatcccctgctgttgcggggagaagctttgaatgcactgaagagaattccttctaaatgaaggcaggtgatagtgttctttctgtaagtaaagggaaagaaaaaaaacatagtttgcttaccaggtggagacaagattcaagacatagcagaagagtggaagacaaatattttccacttaaatgaggctgtttttgacgttctctgccaaggatttagagctttcgttgaactaacataaaaggagtgcgagtcttagtagagatgttccgtgtgtgccgcccgtgctctgaactgcgtttccacctgctgtggtgcttgtgcagcctggcagttcattgtcatctttaataaactaaggaaat

SEQ ID NO: 3526 - DNA, 2665 bp, Homo sapiens
ggctctgggcatcaccagcggccccagggaaaaagaaagaaatgggaaacagcatgaaatccacccctgcgcctgccgagaggcccctgcccaacccggagggactggatagcgacttccttgccgtgctaagtgactacccgtctcctgacatcagccccccgatattccgccgaggggagaaactgcgtgtgatttctgatgaagggggctggtggaaagctatttctcttagcactggtcgagagagttacatccctggaatatgtgtggccagagtttaccatggctggctgtttgagggcctgggcagagacaaggccgaggagctgctgcagctgccagacacaaaggtcggctccttcatgatcagagagagtgagaccaagaaagggttttactcactgtcggtgagacacaggcaggtaaagcattaccgcattttccgtctgccgaacaactggtactacatttccccgaggctcaccttccagtgcctggaggacctggtgaaccactattctgaggtggctgatggcctgtgctgtgtgctcaccacgccctgcctgacacaaagcacggctgccccagcagtgagggcctccagctcacctgtcaccttgcgtcagaagactgtggactggaggagagtgtccagactgcaggaggaccccgagggaacagagaacccgcttggggtagacgagtcccttttcagctatggccttcgagagagcattgcctcttacctgtccctgaccagtgaggacaacacctcctttgatcgaaagaagaaaagcatctccctgatgtatggtggcagcaagagaaagagctcattcttctcatcaccaccttactttgaggactagccaagaacagacacaatggttcatgcccaaaaggaacagaagttccaactattgcctgggatcttgcgaaaagcgaggttccctgatccctgggagcctcacgtattttagaagccaagagaagccacatggagactcaaattcgcatcttctctatccacatcatgaccaaaggaacccctccctggtgtctgatcagggctgtggcatcacaaaacattggatcatgacatgtcgggcgatgcttggaaaagcccagcatgtatgtatgcacacattgtgtgtgtgggaaggacaaagccactctcacaagaaagggcaccaggactgctctccaaggaactggacctgtccagacagttacactccaaggtcattggagagaacttctgtatgggcaagcctgagagggagaggaaacaaaagctgtgtcctggcagaaggtctgggtttgcagatgggtgccctgaatggaactactttaactaatccatagggacttctggtatgctttcctctctttttaaaggaacttcgtgacactaaacattagcccaaaggacttcttagccttcaattgggagatacctttggtctgctcctgcaccaaagccatatgggtggaagtcagttggcctccctggttctgcagagggccagaagaatgagagagaggaagactgctggcagggaaatcgaggaggcgagactagaactgcaccagcttccctgatgtctgcagccatggctttgcagcgcaaacagaacttctctgggatgctgggattcttgcctgtatgaatgcatcaagtattcatttattgcccgaataggcattgcattaagtcctctgttaggtgtcaggcaagccaaaaaaaaaaaaaagatgctaagtcctaacccccaacagaagtgttcacagtgtagacgggaaaaaatgtataaacaaatgtgtaaaaagagaaatcagctcatggcttaggatggaattagagacaggtgagggacactcaggagctcattttccagctgctcttcagagtggaagggctggctggatcgggtaggtaagaatagctggattttttagaaaagaaatggatacagtctaaagaattaactcacccggtactttattctaagaagggtctggcatccatatgaggaaaaatgctcagctccaggaaagatggggagtccaagtggattaatgatgtcatgcataattttaagagacaagggagaaaacacaatgtatagccagagaaggagaagctcccatccaaatcctactaggaagagagtgggctgcagatgaatctgtgactcatgtttccctgtttcaaagggatcctggggaaggaggggaacatgcttgcagtatctctccctgtctgtctgctcacataagcattccgtccatctaagctcatcgtgctactggtatgtgtatgtgcagttacacagtttcctgtatcataaatcctagtgtgtttatacaaggagacatctgtggtttccccaaccgttccaaaaggctatttcaaaggaaccagcccacgtatgagaaatgaatgtaacactgtggacattgacttcccgcataaggcagggtgaccccctgaactccagatgtttgcacagtatcttatgtgttgttttccgttgtgacgaatgtgattggaacatttggggagcacccagagggatttttcagtgggaagcattacactttgctaaatcatgtatttattcctgattaaaacaaacctaataaatatttaacccttggc

SEQ ID NO: 3527 - DNA, 634 bp, Homo sapiens
ggaattccaggagggtgcagcttccttctcaccttgaagaataatcctagaaaactcacaaaatgtgtgatgcttttgtaggtacctggaaacttgtctccagtgaaaactttgatgattatatgaaagaagtaggagtgggctttgccaccaggaaagtggctggcatggccaaacctaacatgatcatcagtgtgaatggggatgtgatcaccattaaatctgaaagtacctttaaaaatactgagatttccttcatactgggccaggaatttgacgaagtcactgcagatgacaggaaagtcaagagcaccataaccttagatgggggtgtcctggtacatgtgcagaaatgggatggaaaatcaaccaccataaagagaaaacgagaggatgataaactggtggtggaatgcgtcatgaaaggcgtcacttccacgagagtttatgagagagcataagccaagggacgttgacctggactgaagttcgcattgaactctacaacattctgtgggatatattgttcaaaaagatattgttgttttccctgatttagcaagcaagtaattttctcccaagctgattttattcaatatggttacgttggttaaataactttttttagatttag

SEQ ID NO: 3528 - DNA, 3409 bp, Homo sapiens
ggtaccagatatgtgggaggaggcaaggtaagggaaagagtacttgaagttggaactggtccttgcagggaaatgcacatttatgaaaccccgaaaactgatgtcaaagcacctcctgccttgggcagtcctctcagagtctacaggtgctgcctccagaaccctcttcctggagcgcatccctatgtatctagaaattctgctgggaaatatgatggtcagacccttggccacctgaaagttcagggtggtagaagaaaaaggaaagccacagggcagcaggggcaggtgcagcaaggaaggcaggcacgccaggaagacacccatgggtagaagtgcagatggcccgagggcacagtttgctcaactcacccaggtttgctcttgctggggccaagaggactcatgtgccagggccaagggctctgggggctctcacagggggcttatctgggcttcggttctggagggccaggaacaaacaggcttcaaagcaagggcttggctggcacacaggggcttggtccttcacctctgtccctctcctacggacacatataagaccctggtcacacctgggagaggaggagaggagagcatagcacctgcagcaagatggatgtgggcagcaaagaggtcctgatggagagcccgccggtgagtgtggttgcgtgtgtgtatgtatgtgcgcgcgcacatgtgtgtgatggccctgcctcctctatcctccctggcctgtttccttatccagatccattcactcaactaacctaggactgtgataagtcaggatggggacaccaagaccactaagccagggacccttggggagctgtttgtggccaagagccactataggggtccgtagaactggagtgcgcgtagacagccctgagtcagaagccatgagaaacttcagaagtcaggggacacttctcagagaaaaaccacatacgagctggagccagaataaggaggagctcgcccggtggagaaggaggaaggcattccaggaaggagggagactctgtatcaccgcatggaggtgatcacttggggagagagaggggctgaccatggctgggggaagcagcagggagagacaggtgaagcaggctctcttgggtccctcaaaactagaccctgcttctaagcttctatgtatctatgggtttgttagaatccaggccacctcctccaagaagccttctctgatctcctcagcccttccctgtccatccatcgcatcggctgtccagcctaggagccgtgggagggtgttcagcttgtatagggagaagaggggacagcctcatgacctcatgcctgtctccttgcctgccccaccgtgtcaggactactccgcagctccccggggccgatttggcattccctgctgcccagtgcacctgaaacgccttcttatcgtggtggtggtggtggtcctcatcgtcgtggtgattgtgggagccctgctcatgggtctccacatgagccagaaacacacggagatggtgagaggtgtgggatgcacagcagtgggcacaggacatgccagacagaggggctaggtgggatgggcgataggaaactgtccaaggggagtggaggggaggaggcaaggggcacagctagaaggaaagaggcacgaaccaggcagcaacccagctcaggcttttccacaaggcccctgcccgcgacaggacagccagctccctccagcacctggttccactcagcctccctgaactcttgggaaagagggaagcgcatttgagtacagaggcctgagtatggggatgggtaccactggctgagtaggaaaggggaagaccaggtggctccatgcctttccccaggttctggagatgagcattggggcgccggaagcccagcaacgcctggccctgagtgagcacctggttaccactgccaccttctccatcggctccactggcctcgtggtgtatgactaccagcaggtgggtatgccagacctcctgacctggaccaatgacaactgggctctgctagagcgcccagctggccactttcattccacatccatctctcctctctcagactttttgctgagcccagattctagtagtctcccgtgcccaacctagagggaggtggctaaggacctgggtcagggagagagcagggcaggaccccgaatgatctccagcattctgtgcctagctgctgatcgcctacaagccagcccctggcacctgctgctacatcatgaagatagctccagagagcatccccagtcttgaggctctcactagaaaagtccacaacttccaggtgtgtgtgtgtgggtgaaaagagtgggctgtctccctcccaggctgctggaggagtgtccgaatggtggctatttgtcacctgtaaagcactgttcctcattggctgccagctgactgcccctctcctattcccctgcacgactcctttccttcccaccccactgccaagctgctgggctcagctgagtccactcactacctggtggcttctgactctagcacagcccctctttactgatgagaaaactgaggctcagagagattgcctgatatacctgaagtcccacaataagggctgcacatgggatagaaactcacttcctacattccagatggaatgctctctgcaggccaagcccgcagtgcctacgtctaagctgggccaggcagaggggcgagatgcaggctcagcaccctccggaggggacccggccttcctgggcatggccgtgaacaccctgtgtggcgaggtgccgctctactacatctaggacgcctccggtgagcaggtgtgatcccagggcccctgatcagcagcggaggagcgctggccacctgcccggctgtggaggaggctcgctgaccaggctggggcgtccactgaagcggggtcatccaggcaactcgggggaggggaagctcacagaccggtacttcccactcccctgaattctctctgtccatcctcaacattcctttgcttcatagggtcagtggaagccccaacggaaaggaaacgccccgggcaaagggtcttttgcagcttttgcagacgggcaagaagctgcttctgcccacaccgcagggacaaaccctggagaaatgggagcttggggagaggatgggagtgggcagaggtggcacccaggggcccgggaactcctgccacaacagaataaagcagcctgatttgaaaagcaaagggtctgcttctgtcttcctgcagggcgcagtcctcgctggcggggccggccaagaagggaagggccttgggagagcaaagtggggtttccattcgccctctgtcccagggcgctggcactgtccacctcggcggggagaggggctcgcagggagcatccacgggcttt

SEQ ID NO: 3529 - DNA, 2085 bp, Homo sapiens
gcatttcttccttctgcgtatgggacaggaccctttctggaatgggggtcttatgacctacaatcaaacaagaacatggacttcccgtgcctctggctagggctgttgctgcctttggtagctgcgctggatttcaactaccaccgccaggaagggatggaagcgtttttgaagactgttgcccaaaactacagttctgtcactcacttacacagtattgggaaatctgtgaaaggtagaaacctgtgggttcttgttgtggggcggtttccaaaggaacacagaattgggattccagagttcaaatacgtggcaaatatgcatggagatgagactgttgggcgggagctgctgctccatctgattgactatctcgtaaccagtgatggcaaagaccctgaaatcacaaatctgatcaatagtacccggatacacatcatgccttccatgaacccagatggatttgaagccgtcaaaaagcctgactgttactacagcatcggaagggaaaattataaccagtatgacttgaatcgaaatttccccgatgcttttgaatataataatgtctcaaggcagcctgaaactgtggcagtcatgaagtggctgaaaacagagacgtttgtcctctctgcaaacctccatggtggtgccctcgtggccagttacccatttgataatggtgttcaagcaactggggcattatactcccgaagcttaacgcctgatgatgatgtttttcaatatcttgcacatacctatgcttcaagaaatcccaacatgaagaaaggagacgagtgtaaaaacaaaatgaactttcctaatggtgttacaaatggatactcttggtatccactccaaggtggaatgcaagattacaactacatctgggcccagtgttttgaaattacgttggagctgtcatgctgtaaatatcctcgtgaggagaagcttccatccttttggaataataacaaagcctcattaattgaatatataaagcaggtgcacctaggtgtaaagggtcaagtttttgatcagaatggaaatccattacccaatgtaattgtggaagtccaagacagaaaacatatctgcccctatagaaccaacaaatatggagagtattatctccttctcttgcctgggtcttatattataaatgttacagtccctggacatgatccacacatcacaaaggtgattattccggagaaatcccagaacttcagtgctcttaaaaaggatattctacttccattccaagggcaattggattctatcccagtatcaaatccttcatgcccaatgattcctctatacagaaatttgccagaccactcagctgcaacaaagcctagtttgttcttatttttagtgagtcttttgcacatattcttcaaataaagtaaaatgtgaaactcaacccacatcaccacctggaatcagggattgctcactccaggttactgcaaccctaactcactctagtgggaccttgactggagaaactccacgatcttcctgaagaagagaaatggatgtttccaaattccacaataagcaatatgtggtgataatgaaaagaatgattcagtcttgacggtgaatggaagacacttacctaacaagtactgctcatttacactcaaattaatcttgaagtagtcttaaaatgtgtaagaagttaaaacttgagaagcaaaaaatgcctgcaaaaagaagatcattttgtatacagagaaccggatgaatataagcaatgaagatgaacatttattgatcttctacatacaagacttcaccataaggccaggagcagtgctcacgccttgtaatcccagcactttgggaggccaaggtgggcggatcaccttgaggtcaggagttcaagaccagcctgaccaacatggtgaaaccctgtctctactaaatattagcggggtgtggtggcgggcacctgtagtcgcagcctttcgggaggctgagacaggagaatcgcttgaaccctagaggcggagtttgcagtgagccgagatagtgccattgtactccagcttgggcaacagagtaagactctgtctc

SEQ ID NO: 3530 - DNA, 2595 bp, Homo sapiens; identical to SEQ ID NO: 3238

SEQ ID NO: 3531 - DNA, 1914 bp, Homo sapiens
gcagccaggcgcgcactgcacagctctcttctctcgccgccgcccgagcgcacccttcagcccgcgcgccggccgtgagtcctcggtgctcgcccgccggccagacaaacagcccgcccgaccccgtcccgaccctggccgccccgagcggagcctggagcaaaatgatgcttcaacacccaggccaggtctctgcctcggaagtgagtgcttctgccatcgtcccctgcctgtcccctcctgggtcactggtgtttgaggattttgctaacctgacgccctttgtcaaggaagagctgaggtttgccatccagaacaagcacctctgccaccggatgtcctctgcgctggaatcagtcactgtcagcgacagacccctcggggtgtccatcacaaaagccgaggtagcccctgaagaagatgaaaggaaaaagaggcgacgagaaagaaataagattgcagctgcaaagtgccgaaacaagaagaaggagaagacggagtgcctgcagaaagagtcggagaagctggaaagtgtgaatgctgaactgaaggctcagattgaggagctcaagaacgagaagcagcatttgatatacatgctcaaccttcatcggcccacgtgtattgtccgggctcagaatgggaggactccagaagatgagagaaacctctttatccaacagataaaagaaggaacattgcagagctaagcagtcgtggtatgggggcgactggggagtcctcattgaatcctcattttatacccaaaaccctgaagccattggagagctgtcttcctgtgtacctctagaatcccagcagcagagaaccatcaaggcgggagggcctgcagtgattcagcaggcccttcccattctgccccagagtgggtcttggaccagggcaagtgcatctttgcctcaactccaggatttaggccttaacacactggccattcttatgttccagatggcccccagctggtgtcctgcccgcctttcatctggattctacaaaaaaccaggatgcccaccgttagattcaggcagcagtgtctgtacctcgggtgggagggatggggccatctccttcaccgtggctaccattgtcactcgtaggggatgtggagtgagaacagcatttagtgaagttgtgcaacggccagggttgtgctttctagcaaatatgctgttatgtccagaaattgtgtgtgcaagaaaactaggcaatgtactcttccgatgtttgtgtcacacaacactgatgtgacttttatatgctttttctcagatctggtttctaagagttttggggggcggggctgtcaccacgtgcagtatctcaagatattcaggtggccagaagagcttgtcagcaagaggaggaacagaattctcccagcgttaacacaaaatccatgggcagcatgatggcaggtcctctgttgcaaactcagttccaaagtcacaggaagaaagcagaaagttcaacttccaaagggttaggactctccactcaatgtcttaggtcaggagttgtgtctaggctggaagagccaaagaaatattccattttcctttccttgtggttgaaaccacagtcagtggagagatgtttggaacacagtcagtggagctggtggtaccaggtttagcattattggatgtcaaaagcattttttttgtcatgtagctgttttaagaaatctggcccagggtgtttgcagctgtgagaagtcactcacactggccacaaggacgctggctactgtctattaaaattctgatgtttctgtgaaattctcagagtgtttaattgtactcaatggtatcattacaattttctgtaagagaaaatattacttatttatcctagtattcctaacctgtcagaataataaatattgtggtaaaa

SEQ ID NO: 3532 - DNA, 3777 bp, Homo sapiens
tggctgagtggctactctcggcttcctggcaacgccgagcgaaagctatgactgcggccgcgggttcggcgggccgcgccgcggtgcccttgctgctgtgtgcgctgctggcgcccggcggcgcgtacgtgctcgacgactccgacgggctgggccgggagttcgacggcatcggcgcggtcagcggcggcggggcaacctcccgacttctagtaaattacccagagccctatcgttctcagatattggattatctctttaagccgaattttggtgcctctttgcatattttaaaagtggaaataggtggtgatgggcagacaacagacggcactgagccctcccacatgcattatgcactagatgagaattatttccgaggatacgagtggtggttgatgaaagaagctaagaagaggaatcccaatattacactcattgggttgccatggtcattccctggatggctgggaaaaggtttcgactggccttatgtcaatcttcagctgactgcctattatgtcgtgacctggattgtgggcgccaagcgttaccatgatttggacattgattatattggaatttggaatgagaggtcatataatgccaattatattaagatattaagaaaaatgctgaattatcaaggtctccagcgagtgaaaatcatagcaagtgataatctctgggagtccatctctgcatccatgctccttgatgccgaacttttcaaggtggttgatgttataggggctcattatcctggaacccattcagcaaaagatgcaaagttgactgggaagaagctttggtcttctgaagactttagcactttaaatagtgacatgggtgcaggctgctggggtcgcattttaaatcagaattatatcaatggctatatgacttccacaatcgcatggaatttagtggctagttactatgaacagttgccttatgggagatgcgggttgatgacggcccaagagccatggagtgggcactacgtggtagaatctcctgtctgggtatcagctcataccactcagtttactcaacctggctggtattacctgaagacagttggccatttagagaaaggaggaagctacgtagctctgactgatggcttagggaacctcaccatcatcattgaaaccatgagtcataaacattctaagtgcatacggccatttcttccttatttcaatgtgtcacaacaatttgccacctttgttcttaagggatcttttagtgaaataccagagctacaggtatggtataccaaacttggaaaaacatccgaaagatttctttttaagcagctggattctctatggctccttgacagtgatggcagtttcacactgagcctgcatgaagatgagctgttcacactcaccactctcaccactggtcgcaaaggcagctacccgcttcctccaaaatcccagcccttcccaagtacctataaggatgatttcaatgttgattacccattttttagtgaagctccaaactttgctgatcaaactggtgtatttgaatattttacaaatattgaagaccctggcgagcatcacttcacgctacgccaagttctcaaccagagacccattacgtgggctgccgatgcatccaacacaatcagtattataggagactacaactggaccaatctgactataaagtgtgatgtttacatagagacccctgacacaggaggtgtgttcattgcaggaagagtaaataaaggtggtattttgattagaagtgccagaggaattttcttctggatttttgcaaatggatcttacagggttacaggtgatttagctggatggattatatatgctttaggacgtgttgaagttacagcaaaaaaatggtatacactcacgttaactattaagggtcatttcgcctctggcatgctgaatgacaagtctctgtggacagacatccctgtgaattttccaaagaatggctgggctgcaattggaactcactcctttgaatttgcacagtttgacaactttcttgtggaagccacacgctaatacttaacagggcatcatagaatactctggattttcttcccttctttttggttttggttcagagccaattcttgtttcattggaacagtatatgaggcttttgagactaaaaataatgaagagtaaaaggggagagaaatttatttttaatttaccctgtggaagattttattagaattaattccaaggggaaaactggtgaatctttaacattacctggtgtgttccctaacattcaaactgtgcattggccatacccttaggagtggtttgagtagtacagacctcgaagccttgctgctaacacctgaggtagctctcttcatcttatttgcgagcggtctctgtagagtggcagtaacttgatcatcactgagatgtattgtatgcatgctgaccgtgtgtccaagtgagccagtgtctgtcatcacaagatgatgctgccataatagaaagctgaagaacactagaagtagcttcttgaaaaccacttcaacctgttatgctttatgctctaaaaagtatttttttattttcctttttaagatgatacttttgaaatgcaggatatggatgagtgggatgattttaaaaacgcctgtttaataaactacctctaacactatttctgcggtaatagatattagcagattaattgggttatttgcattatttaatttttttgattccaaggttttggtcttgtaaccactatcactctctgtgaacgtttttccaggtggctggaagaaggaagaaaacctgatatagccaatgctgttgtagtcgtttcctcagcctcatctcactgtgctgtggtctgtcctcacatgtgcactggtaacagactcacacagctgatgaatgcttttctctccttatgtgtggaaggaggggagcacttagacatttgctaactcccagagttggatcatctcctaagatgtacttactttttaaagtccaaatatgtttatatttaaatatacgtgagcatgttcatcatgttgtatgatttatactaagcattaatgtggctctatgtagcaaatcagttattcatgtaggtaaagtaaatctagaattatttataagaattactcattgaactaattctactatttaggaatttgtaagagtctaacataggcttagctacagtgaagttttgcattgcttttgaagacaagaaaagtgctagaataaataagattacagagaaaattttttgttaaaaccaagtgatttccagctgatgtatctaatattttttaaaacaaacattatagaggtgtaatttatttacaataaaatgttcctactttaaatatacaattcagtgagttttgataaattgatatacccatgtaaccaacactccagtcaagcttcagaatatttccatcaccccagaaggttctcttgtatacctgctcagtcagttcctttcactcccaattgttggcagccattgataggaattctatcactataggttagttttctttgttccagaacatcatgaaagcggcgtcatgtactgtgtattcttatgaatggtttctttccatcagcataatgctttgagattggtccatgttgtgtgattcagtggtttgttccttcttatttctgaaaagttttccattgtatgaatataccacaatttgtttcctccccaccagtttctgatactacaattaaaactgtctacatttac

SEQ ID NO: 3533 - DNA, 1757 bp, Homo sapiens
cagcatgaaggcactcctggccctgccgctgctgctgcttctctccacgcccccgtgtgccccccaggtctccgggatccgaggagatgctctggagaggttttgccttcagcaacccctggactgtgacgacatctatgcccagggctaccagtcagacggcgtgtacctcatctacccctcgggccccagtgtgcctgtgcccgtcttctgtgacatgaccaccgagggcgggaagtggacggttttccagaagagattcaatggctcagtaagtttcttccgcggctggaatgactacaagctgggcttcggccgtgctgatggagagtactggctggggctgcagaacatgcacctcctgacactgaagcagaagtatgagctgcgagtggacttggaggactttgagaacaacacggcctatgccaagtacgctgacttctccatctccccgaacgcggtcagcgcagaggaggatggctacaccctctttgtggcaggctttgaggatggcggggcaggtgactccctgtcctaccacagtggccagaagttctctaccttcgaccgggaccaggacctctttgtgcagaactgcgcagctctctcctcaggagccttctggttccgcagctgccactttgccaacctcaatggcttctacctaggtggctcccacctctcttatgccaatggcatcaactgggcccagtggaagggcttctactactccctcaaacgcactgagatgaaaatccgccgggcctgaagggctggccccctcaggcacctttcctcccctggacacccatggtctccatgagtgctccctctgctgcccctgatgcatgcttctgctgattcccgagcaccaactccttacaagggggccttgtggctctcagccatgccacatccctgtcacacacccagggcatccattcctaagccagacccggctcccctacacctgaagttacactgccagcagttccccaggcctcttccgagaggcacatggttctagcctggacctggctgggctccatgagaatgagttgcctccaccctgtcccaacagctgacagccaggagccactctcccagctgcaggcctttgtggtgcatcttgtcctgcttcctcactgtggacccctgtctgggccaccctagtgtgctaagctgagcagtgcagtgtgaacagggcccatggtgtattctaggccacagcccagcactcctctgggctgctctcaaaccatgtcccatcttcagcatccctcccaccaacttactcccctgtggtgagtaccgtggaaccccagcccacctcactatcatactcagcttcccctgatggcccatcccagcccctgaagctctatgccaagaacacagctaccgcacaccaccctgaaacagccacagccaaggtaggcatgcatatgaggtcttccccataccctctgggtgttgagaggtttagccacatgagggagcagaggacaatctctgcagggctgggagtgggtagggactgaaggtctcaataaaccttcagaacctgaatgaactggcttcatacacacaaacatatttgtttatcccccaaatgtaggcacctggctcctccttgctcccctgctgatggtgtcctaccccgaactccaaaaattacacctggagtcaggtgcagaagggaaccttgtatttcacaggcctcattttgatggcaaaaagacagtgtaataata

SEQ ID NO: 3534 - DNA, 3915 bp, Homo sapiens
gtggggtggggtggggctgggggcttgtcgccctttcaggctccaccctttgcggagattataaatagtcatgatcccagcgagacccagagatgcctgtaatggtgagactttggatccttcctgaggacgtggagaaaactttctgctgagaaggacattttgaaggttttgttggctgaaaaagctgtttctggaatcacccctagatctttcttgaagacttgaattagattacagcgatggggacacagaaggtcaccccagctctgatatttgccatcacagttgctacaatcggctctttccaatttggctacaacactggggtcatcaatgctcctgagaagatcataaaggaatttatcaataaaactttgacggacaagggaaatgccccaccctctgaggtgctgctcacgtctctctggtccttgtctgtggccatattttccgtcgggggtatgatcggctccttttccgtcggactcttcgtcaaccgctttggcaggcgcaattcaatgctgattgtcaacctgttggctgtcactggtggctgctttatgggactgtgtaaagtagctaagtcggttgaaatgctgatcctgggtcgcttggttattggcctcttctgcggactctgcacaggttttgtgcccatgtacattggagagatctcgcctactgccctgcggggtgcctttggcactctcaaccagctgggcatcgttgttggaattctggtggcccagatctttggtctggaattcatccttgggtctgaagagctatggccgctgctactgggttttaccatccttcctgctatcctacaaagtgcagcccttccattttgccctgaaagtcccagatttttgctcattaacagaaaagaagaggagaatgctaagcagatcctccagcggttgtggggcacccaggatgtatcccaagacatccaggagatgaaagatgagagtgcaaggatgtcacaagaaaagcaagtcaccgtgctagagctctttagagtgtccagctaccgacagcccatcatcatttccattgtgctccagctctctcagcagctctctgggatcaatgctgtgttctattactcaacaggaatcttcaaggatgcaggtgttcaagagcccatctatgccaccatcggcgcgggtgtggttaatactatcttcactgtagtttctctatttctggtggaaagggcaggaagaaggactctgcatatgataggccttggagggatggctttttgttccacgctcatgactgtttctttgttattaaaggataactataatgggatgagctttgtctgtattggggctatcttggtctttgtagccttctttgaaattggaccaggccccattccctggtttattgtggccgaactcttcagccagggcccccgcccagctgcgatggcagtggccggctgctccaactggacctccaacttcctagtcggattgctcttcccctccgctgctcactatttaggagcctacgtttttattatcttcaccggcttcctcattaccttcttggcttttaccttcttcaaagtccctgagacccgtggcaggacttttgaggatatcacacgggcctttgaagggcaggcacacggtgcagatagatctggaaaggacggcgtcatggagatgaacagcatcgagcctgctaaggagaccaccaccaatgtctaagtcgtgcctccttccacctccctcccggcatgggaaagccacctctccctcaacaagggagagacctcatcaggatgaacccaggacgcttctgaatgctgctacttaattcctttctcatcccacgcactccatgagcaccccaaggctgcggtttgttggatcttcaatggctttttaaattttatttcctggacatcctcttctgcttaggagagaccgagtgaacctaccttcatttcaggagggattggccgcttggcacatgacaactttgccagcttttcctcccttgggttctgatattgccgcactaggggatataggagaggaaaagtaaggtgcagttcccccaacctcagacttaccaggaagcagatacatatgagtgtggaagccggagggtgtttatgtaagagcaccttcctcacttccatacagctctacgtggcaaattaacttgagttttatttattttatcctctggtttaattacataatttttttttttttactttaagtttcaggatacatgtgccgaatgtgcaggtttgttacataggtatatatatgccatgatggaaatatttatttttttaagcgtaattttgccaaataataaaaacagaaggaaattgagattagagggaggtgtttaaagagaggttatagagtagaagatttgatgctggagaggttaaggtgcaataagaatttagggagaaatgttgttcattattggagggtaaatgatgtggtgcctgaggtctgtacgttacctcttaacaatttctgtccttcagatggaaactctttaacttctcgtaaaagtcatatacctatataataaagctactgatttccttggagcttttttctttaagataatagtttacatgtagtagtacttgaaatctaggattattaactaatatgggcattgtagttaatgatggttgatgggttctaattttggatggagtccagggaagagaaagtgatttctagaaagcctgttcccctcactggatgaaataactccttcttgtagtagtctcattacttttgaagtaatcccgccacctatctcgtgggagagccatccaaataagaaacctaaaataattggttcttggtagagattcattatttttccactttgttctttaggagattttaggtgttgattttctgttgtattttaactcatacctttaaaggaattccccaaagaatgtttatagcaaacttggaatttgtaacctcagctctgggagaggatttttttctgagcgattattatctaaagtgtgttgttgctttaggctcacggcacgcttgcgtatgtctgttaccatgtcactgtggtcctatgccgaatgccctcaggggacttgaatctttccaataaaccaggtttagacagtatgagtcaatgtgcagtgtagcccacacttgagaggatgaatgtatgtgcactgtcactttgctctgggtggaagtacgttattgttgacttattttctctgtgtttgttcctacagcccctttttcatatgttgctcagtctccctttcccttcttggtgcttacacatctcagaccctttagccaaacccttgtcagtgacagtattttggttcttagttctcactgttccctctgctcctggagcctttgaataaaaatgcacgtagctgaggccggatgcggtggctcacgcctgtaatcccagcactttgggaggcctaggcgggcggtcaggggttcgagaccagtctggccaacatcgtgaaaccctgtctctactaaaaatgcaaaaattagccgggcgtggtggcgggcgcctgtaatcccagctacttgggaagctgaggcgggagaatcatgtgaacccgggacgcaggggttgcagtgagcggagatcgcatcattgcactctagcctgggccacagggcgagactccgtctcaaaaaaaaaaaaatgcacatagctatcgagtgtgctttagcttgaaaaggtgaccttgcaacttcatgtcaactttctggctcctcaaacagtaggttggcagtaaggcagggtcccatttctcactgagaagattgtgaatatttccatatggattttctattgttactctggttctttgttttaaaataaaaattctgaatgtacacg

SEQ ID NO: 3535 - DNA, 397 bp, Homo sapiens
cttgccccctccctccccagagcctgtgtcggacagccagatggtcatcatagtcacggtggtgtcggtgttgctgtccctgttcgtgacatctgtcctgctctgcttcatcttcggccagcacttgcgccagcagcggatgggcacctacggggtgcgagcggcttggaggaggctgccccaggccttccggccatagcaaccatgagtggcatggccaccaccacggtggtcactggaactcagtgtgactcctcagggttgaggtccagccctggctgaaggactgtgacaggcagcagagacttgggacattgccttttctagcccgaatacaaacacctggacttagccctgtgcccacagtgtctcctcctgggataacaatggccaggga

SEQ ID NO: 3536 - DNA, 1341 bp, Homo sapiens
gaattccggcgaccgtgtgggatgaggccgagcaagatggaattggggaggaggtgctcaagatgtccacggaggagatcatccagcgcacacggctgctggacagtgagatcaagatcatgaagagtgaagtgttgagagtcacccatgagctccaagccatgaaggacaagataaaagagaacagtgagaaaatcaaagtgaacaagaccctgccgtaccttgtctccaacgtcatcgagctcctggatgttgatcctaatgaccaagaggaggatggtgccaatattgacctggactcccagaggaagggcaagtgtgctgtgatcaaaacctctacacgacagacgtacttccttcctgtgattgggttggtggatgctgaaaagctaaagccaggagacctggtgggtgtgaacaaagactcctatctgatcctggagacgctgcccacagagtatgactcgcgggtgaaggccatggaggtagacgagaggcccacggagcaatacagtgacattgggggtttggacaagcagatccaggagctggtggaggccattgtcttgccaatgaaccacaaggagaagtttgagaacttggggatccaacctccaaaaggggtgctgatgtatgggcccccagggacggggaagaccctcctggcccgggcctgtgccgcacagactaaggccaccttcctaaagctggctggcccccagctggtgcagatgttcattggagatggtgccaagctagtccgggatgcctttgccctggccaaggagaaagcgccctctatcatcttcattgatgagttggatgccatcggcaccaagcgctttgacagtgagaaggctggggaccgggaggtgcagaggacaatgctggagcttctgaaccagctggatggcttccagcccaacacccaagttaaggtaattgcagccacaaacagggtggacatcctggaccccgccctcctccgctcgggccgccttgaccgcaagatagagttcccgatgcccaatgaggaggcccgggccagaatcatgcagatccactcccgaaagatgaatgtcagtcctgacgtgaactacgaggagctggcccgctgcacagatgacttcaatggggcccagtgcaaggctgtgtgtgtggaggcgggcatgatcgcactggccaggggtgccacggagctcacccacgaggactacatggaaggcatcctggaggtgcaggccaagaagaaagccaacctacaatactacgcctaggcacacaggccagccccagtctcacggctgaagtgcgcaataaaagatggtttagggggaattc

SEQ ID NO: 3537 - DNA, 4567 bp, Homo sapiens; identical to SEQ ID NO: 3246

SEQ ID NO: 3538 - DNA, 428 bp, Homo sapiens
tcttttaggagacccccgaaggctgtgaacaagtgctcacaggcaaaagactcatgcagtgtctcccaaacccagaggatgtgaaaatggccctggaggtatataagctgtctctggaaattgaacaactggaactacagagagacagcgcaagacaatccactttggataaagaactataatttttctcaaaagaaggaggaaaaggtgtcttgctggcttgcctcttgcaattcaatacagatcagtttagcaaatctactgtcaatttggcagtgatattcatcataataaatatctagaaatgataatttgctaaagtttagtgctttgagattgtgaaattattaatcatcctctgtgtggctcatgtttttgcttttcaacacacaaagcacaaattttttttcgattaaaaatgtatgtat

SEQ ID NO: 3539 - DNA, 1121 bp, Homo sapiens
ggaattccctatagagccgggtgagagagcgagcgcccgtcggcgggtgtcgagggcgggttgcctcgcgctgacccttcccgccctccttctcgtcacacaccaggtccccgcggaagccgcggtgtcggcgccatggcggagctgacggctcttgagagtctcatcgagatgggcttccccaggggacgcgcggagaaggctctggccctcacagggaaccagggcatcgaggctgcgatggactggctgatggagcacgaagacgaccccgatgtggacgagcctttagagactccccttggacatatcctgggacgggagcccacttcctcagagcaaggcggccttgaaggatctgcttctgctgccggagaaggcaaacccgctttgagtgaagaggaaagacaggaacaaactaagaggatgttggagctggtggcccagaagcagcgggagcgtgaagaaagagaggaacgggaggcattggaacgggaacggcagcgcaggagacaagggcaagagttgtcagcagcacgacagcggctacaggaagatgagatgcgccgggctgctgctgaggagaggcggagggaaaatgccgaggagttagcagccagacaaagagttagagaaaagatcgagagggacaaagcagagagagccaagaagtatggtggcagtgtgggctctcagccacccccagtggcaccagagccaggtcctgttccctcttctcccagccaggagcctcccaccaagcgggagtatgaccagtgtcgcatacaggtcaggctgccagatgggacctcactgacccagacgttccgggcccgggaacagctggcagctgtgaggctctatgtggagctccaccgtggggaggaactaggtgggggccaggaccctgtgcaattgctcagtggcttccccagacgggccttctcagaagctgacatggagcggcctctgcaggagctgggactcgtgccttctgctgttctcattgtggccaagaaatgtcccagctgagggcctttgtcccattgtccctctgtgaccccttcatctttgataaagcactgacatctccttcctaataaatagaccctgagttctgt

SEQ ID NO: 3540 - DNA, 341 bp, Homo sapiens
aggagaagggaggtgactccggcggaagaggacaaggcagaatgcaggcccttcgggtgtcccaggcgctgatccgctccttcagctccaccgcccggaaccgctttcagaaccgagtgcgcgagaaacagaagctcttccaggaggacaatgacatcccgttgtacctgaagggcggcatcgttgacaacatcctgtaccgagtgacaatgacgctgtgtctgggcggcactgtctacagcttgtactcccttggctgggcctccttccccaggaattaagaccaagaagcctggggggcctgagagacttgaacaagtgtcaataaacgctggcctctg

SEQ ID NO: 3541 - DNA, 691 bp, Homo sapiens; identical to SEQ ID NO: 764

SEQ ID NO: 3542 - DNA, 2304 bp, Homo sapiens
ttggagctgccgccgccgggactcccgtcccagcaggacatggatttgattgacatactttggaggcaagatatagatcttggagtaagtcgagaagtatttgacttcagtcagcgacggaaagagtatgagctggaaaaacagaaaaaacttgaaaaggaaagacaagaacaactccaaaaggagcaagagaaagcctttttcactcagttacaactagatgaagagacaggtgaatttctcccaattcagccagcccagcacacccagtcagaaaccagtggatctgccaactactcccaggttgcccacattcccaaatcagatgctttgtactttgatgactgcatgcagcttttggcgcagacattcccgtttgtagatgacaatgaggtttcttcggctacgtttcagtcacttgttcctgatattcccggtcacatcgagagcccagtcttcattgctactaatcaggctcagtcacctgaaacttctgttgctcaggtagcccctgttgatttagacggtatgcaacaggacattgagcaagtttgggaggagctattatccattcctgagttacagtgtcttaatattgaaaatgacaagctggttgagactaccatggttccaagtccagaagccaaactgacagaagttgacaattatcatttttactcatctataccctcaatggaaaaagaagtaggtaactgtagtccacattttcttaatgcttttgaggattccttcagcagcatcctctccacagaagaccccaaccagttgacagtgaactcattaaattcagatgccacagtcaacacagattttggtgatgaattttattctgctttcatagctgagcccagtatcagcaacagcatgccctcacctgctactttaagccattcactctctgaacttctaaatgggcccattgatgtttctgatctatcactttgcaaagctttcaaccaaaaccaccctgaaagcacagcagaattcaatgattctgactccggcatttcactaaacacaagtcccagtgtggcatcaccagaacactcagtggaatcttccagctatggagacacactacttggcctcagtgattctgaagtggaagagctagatagtgcccctggaagtgtcaaacagaatggtcctaaaacaccagtacattcttctggggatatggtacaacccttgtcaccatctcaggggcagagcactcacgtgcatgatgcccaatgtgagaacacaccagagaaagaattgcctgtaagtcctggtcatcggaaaaccccattcacaaaagacaaacattcaagccgcttggaggctcatctcacaagagatgaacttagggcaaaagctctccatatcccattccctgtagaaaaaatcattaacctccctgttgttgacttcaacgaaatgatgtccaaagagcagttcaatgaagctcaacttgcattaattcgggatatacgtaggaggggtaagaataaagtggctgctcagaattgcagaaaaagaaaactggaaaatatagtagaactagagcaagatttagatcatttgaaagatgaaaaagaaaaattgctcaaagaaaaaggagaaaatgacaaaagccttcacctactgaaaaaacaactcagcaccttatatctcgaagttttcagcatgctacgtgatgaagatggaaaaccttattctcctagtgaatactccctgcagcaaacaagagatggcaatgttttccttgttcccaaaagtaagaagccagatgttaagaaaaactagatttaggaggatttgaccttttctgagctagtttttttgtactattatactaaaagctcctactgtgatgtgaaatgctcatactttataagtaattctatgcaaaatcatagccaaaactagtatagaaaataatacgaaactttaaaaagcattggagtgtcagtatgttgaatcagtagtttcactttaactgtaaacaatttcttaggacaccatttgggctagtttctgtgtaagtgtaaatactacaaaaacttatttatactgttcttatgtcatttgttatattcatagatttatatgatgatatgacatctggctaaaaagaaattattgcaaaactaaccacgatgtacttttttataaatactgtatggacaaaaaatggcattttttataattaaattgtttagctctggcaaaaaaaaaaaattttttaagagctggtactaataaaggattattatgactgttaaaaaaaaaaaaaaaaaa

SEQ ID NO: 3543 - DNA, 4995 bp, Homo sapiens
aattctggaagggtcccttttattcaactgcttcaatccaggggcccccgaagtctgaccacagcaatgctccaaaccatgtgtctttcctggcttaaggttcagtcgccctcctcagaggggagcctatgaaagagcccagtggagtgtcagggtcctgagtcctagtcctagtcctgtccctgccacttgtgagggaacttgggcctcagtttctccaggtgggctccacaattgcttctcttgatctggactgccccagtgcccaggttcagtgagtgacacaggcagctgggtttccacatcctctgacttgggttcccttcactgcctccaggcaggctcggccctccaccccaagtggcccattgtgtgagctcagtttcagtggggacagaaactgggttgagaaaagggaatatttacctatcccaccaagccaatgccaagtaaatagtgcagtatcttatgtagagcccttgccctgcccttccccatctgggtgctgctgcctagagcatataaaaggcaccttgctgggcatgtctcatactagcccaccagactcagagacggaaccagagacaggccagagcatccccctcctccaccatgaaactcgctgtcaccctcaccctggtcacactggctctctgctgcagctccggtgagtgctcagagacccttccctccctcctggacttaggaactctcaggaccccccagttctgctcagaagaaggagtgagctgcccattcctgctctggagctgctgggaggacctgggcatgctgagtctcagaaaactgggtctggtgagcaagctcatcttggaaacttggagagagcccaggctgtaaggaagcctaaaaagggtcccatcttctatatcaacaaccctcagaatcccagggaatggaatagcctggagggaggagtggagaataccccataaagatgagtactccagcataggaataatgaggccctcatcccagatctggacagactccaagattctgagaccttggtgcagcctccaagtctggggtctccactccatctggcagctgaagtcactggaaggggagctgcagggactcgtgaccccaaaagaaacccaacccaagacaaggtctctcattctgggcacagaggaatatccagaaagagagcttccctttgggaactgccaacccagagtgaagttttctaaacatttccgtcctctgcaaaagggattaggagtctctgagtagttgctgctgtcactaaaaggaaaagaactgtggggggaagaggggcaaaaagagagacggagagagggggagaaaggaaggaaagaaggatcacagctctctccaagatcccccgtctttggggaactgggttatctaactctgtttttcactctgcgtcagcctcttccatctcactgaaaatgctgttgttattttttaataaacaaactccaattaattcacttggaaagcttcacaacacccatggagataagtttttatgaccctggggagttagaaaacccaaaccaagaagcagtaggaacaactatttgcagagaggtttatttgtttttcagagaaaatgacatcattttggactgaaatgtgtattaattagaagatctcagtgctgtctgcgtacagaggtgggtggctgagcaagataggactgcaacatattaaggggtgggtcagagatcatttgtctattgtgtgcactgcatacatatttaacacttctcacacatgtgccaatcactgtcaccctttcaataatatctcttttcattcttttttttttttttttttgagacagagtctcgctctgttgccaggctgggtgcagtggcgcgatctcagctcactgcaacctccgcctcccgggttcaagcgattctcctgcctcagcctccagtaggtgggttacaggcacgcaccactgcacccagctaatttttgtatttttagtagagacagggtttcacacatgttggccagatggtctccatctcttgacctctggatccaccacctagcctcccaagtgctgggttagcgtgagccaccatgcctggcctctcttttattcttacaacaaccctatgaagtaggatattgggccaggcacggtctgcacgcctgtaatcccagcaatttgggaggccgagtgggtagatcacttgaggtcaggagttcaggaccaacctggccaacatggtgaaaccttgtctctattaaaaatacaaaaattagccaggcatggtggcgcatgcctgtagtcccagctacttgggaggccgaggcaggagaatcacttgaacctgggaggcagaggttgcagtcagccgagatggcatcactgcactccagcctgggcaatagagcgagactccgtctgaaaacaaataaataaataaaaataaaatttaaattaaattaaaatttaaaaaaaataaaaaataaaatgaagtagggatattgttcccattttacagatgagaaaactgagctacagaaacacagagtgacttgcctggtacacagtaagttaccaccattcaaggacctaagttctggagagggtctgacttggagtggcaatttctagtgaggccctagagtcagaggagggaaggcaaatttgttcagaaggcagagaattcaaggaaaagggatttgagactcactgggaagatggaggcaagcagtgggtagaaaatggtgactttcccccatgttcctggttgtaaggacctgagaagaaaacagagtctggaagctctgtgttgaagggaatgaagtggtacaagtggctgctctgtccatgagctgagtgtgccacagggcccggtgtgcacatgtgcacacctcttcccggccaggttcgggggcccatgtttggctggtacaatctcaatggcttcttttcttttcttttcttctttttcttttctcttgcttgcttgcttgcttgcttgcttgcttgctttttgagacagaatctcgctctgttgcccaggctggagtgcagtgacgagatctcagctcactgcaactttgcttcctggattcaagtgattctcctgcctcagcctcctgagtagctaggttacgggtgcccagaaccacgcccggctaattttttgtatttttagtagagacggggtttcaccatgttggccaggctggtctcgaactcctgacctcgtgatccgcctgcctcggctcccaaagtgctgggattacaggtgtgagccaccgtgcctggcttacaatcgcttttttcctgccagagcctgaatttgtcacatgcccccagtgaagcatggctcagggcatctctaaccctgatgagaggcttgtttctggtgggaaataaaaccctcagtggcctcttcccagcctccacactgcattaaaaaatcaggccagcagcttctatgatcaatactctgccttgatctccaacagaaagaaaaacggcacttgctcacctcaacccaagaagtctaaggaagactcgggcaatccacaaatcttacactctagtccatcgatgaaaaggctgctatctctcgctgatgggcctggctgtttgcatctgggcagacccagccagccagagggctagccagcttggaaaggggcctggagacatgtgccttctctcctctgagttgcagcttctgcagagatctgcccgagctttcagcgtgtcatcgaaaccctcctcatggacacaccctccagttatgaggctgccatggaacttttcagccctgatcaagacatgagggaggcaggggctcagctgaagaagctggtggacaccctcccccaaaagcccagagaaagcatcattaagctcatggtaaccagcacctttcacgtcacactggttagaagtggcttccccggccgggcgcggtggctcacgcctgtaatcccagcactttgggaggccgaggcgggcggatcacgaggtcgggagatcgaggccatcccggctaaaacggtgaaaccccgtctctactaaaaatacaaaaaaattagccgggcgtagtggcgggcgcctgtagtcccagctacttgggcaggctgaggcaggagaatggcgtgaacccgggaggcggagcttgcagtgagccgagatcccgccactgcactccagcctgggcgacagagcgagactccgtctcaaaaaaaaaaaaaaaaaaaacagaagtggcttccccaagtggggctgcaggattgccccagttttcagacctgtttctaatccagagaggagagtcacagtgccactgtccccaggcaggcagcacagtgatctttctagacatctccttcttttttttttttttttttttgagacagagtctcgctctgtcgcccagactagggtgcaatagcacgatcttggcttactgcaacctccacctcccaggttcaagcgatctccggcctcagcctcttgagtagctgggattacaggcacccaccatcatgccgagctaatttctgtatttttgtagagatggggtttcaccgtgtttgccaggctggtctcgaactcctgacctcaggtgatccacccgcctcagcctcccaaagtgctggcattaaaggcgtgagccaccacgcccagcctccccttactattttgtaagaggcttttgagaaacaatccaagcccttactaccttagttcctcctagagttgactgcacctctcggttaatgttgaagtttctgtggctcgtcatctctgcctaactatgcaattcattcactgttgtattgggtttttctgtttctttgtctatttgttttaggaaaaaatagcccaaagctcactgtgtaattagcatttagaagctgaagatccccaactgctccagcctctgccgctgccatgctttgagtccacgcccaccagccttgctctcttcaataaaccacaagcatctc

SEQ ID NO: 3544 - DNA, 5265 bp, Homo sapiens
ctcgcccctccgcgctcgcaacttcggcctcccccggctcccgcccgccctccctcctttgttgcgcgatgagggtcgggtttcggatctgaccgagccgccgccgcgggatggagccgctcagccaccggggcctgccgcgcctgtcctggatcgacaccctctacagcaacttcagctacgggacggacgagtacgacggagaggggaatgaggagcagaaggggcccccggagggctcagagaccatgccgtacatcgatgagtcgcccaccatgtccccgcagctcagcgcccgcagccagggccggggggatggcgtctccccgactccacctgagggactggctcctggggtggaagcagggaaaggcctggagatgaggaagctggttctctcggggttcttggccagcgaagagatctacattaaccagctggaagccctgttgctgcccatgaaacccctgaaggccaccgccaccacctcccagcccgtgctcaccatccagcagatcgagaccatcttctacaagatccaggacatctatgagatccacaaggagttctatgacaacctgtgccccaaggtgcaacagtgggacagccaggtcaccatgggccacctcttccagaagctggccagccagctcggtgtgtacaaagcgtttgtcgataactataaagtcgctctggagacagctgagaagtgcagccagtccaacaaccagttccagaagatctcagaggaactcaaagtgaaaggtcccaaggactccaaggacagccacacgtctgtcaccatggaagctctgctctacaagcccattgaccgggtcactcggagcaccctagtcctacacgacctgctgaagcacacacctgtggaccaccccgactacccgctgctgcaggatgccctccgcatctcccagaacttcctgtccagcatcaacgaggacatcgacccccgccggactgcagtgacaacgcccaagggggagacgcgacagctggtgaaggacggcttcctggtggaagtgtcagagagctcccggaagctgcggcacgtcttcctctttacagatgtcctactgtgtgccaagctgaagaagacctctgcagggaagcaccagcagtatgactgtaagtggtacatccccctggccgacctggtgtttccatcccccgaggaatctgaggccagcccccaggtgcaccccttcccagaccatgagctggaggacatgaagatgaagatctctgccctcaagagtgaaatccagaaggagaaagccaacaaaggccagagccgtgccatcgagcgcctgaagaagaagatgtttgagaatgagttcctgctgctgctcaactcccccacaatcccgttcaggatccacaatcggaatggaaagagttacctgttcctactgtcctcggactacgagaggtcagagtggagagaagcaattcagaaactacagaagaaggatctccaggcctttgtcctgagctcagtggagctccaggtgctcacaggatcctgtttcaagcttaggactgtacacaacattcctgtcaccagcaataaagacgacgatgagtctccaggactctatggcttccttcatgtcatcgtccactctgccaagggatttaagcaatcagccaacctgtactgtaccctggaggtggattccttcggctattttgtcagcaaagccaaaaccagggtgttccgggacacagcggagcccaagtgggatgaggagtttgagatcgagctggagggctcccagtccctgaggatcctgtgctatgagaagtgctatgacaagaccaaggtcaacaaggacaacaatgagatcgtggacaagatcatgggcaaaggacagatccagctggacccacaaaccgtggagaccaagaactggcacacggacgtgattgagatgaacgggatcaaagtggaattttccatgaaattcaccagccgagatatgagcctgaagaggaccccgtccaaaaagcagaccggcgtcttcggtgtgaagatcagcgtggtgacgaagcgggagcgctccaaggtgccctacatcgtccggcagtgtgtggaggaggtggagaagaggggtatcgaggaggttggcatctacaggatatcgggcgtggccacggacatccaggcgctcaaggccgtcttcgatgccaataacaaggacatcctgctgatgctgagtgacatggacatcaacgccatcgccgggacgctcaagctgtacttccgggaactgcccgagccgctcctcacggaccgactctacccagccttcatggagggcatcgccctgtcagaccctgctgccaaggaaaactgcatgatgcacctgctccgctccctgcccgaccccaacctcatcaccttcctcttcctgctggaacacttgaaaagggttgccgagaaggagcccatcaacaaaatgtcacttcacaacctggctaccgtgtttggacccacgttactgagaccctcagaagtggagagcaaagcacacctcacctcggctgcggacatctggtcccatgacgtcatggcgcaggtccaggtcctcctctactacctgcagcacccccccatttccttcgcagaactcaagcggaacacactgtacttctccaccgacgtgtagcccgaggcagggtggctgcgggcgggtggtggaaccagcccctccagcctggggtccaactcagacttgaaagactgcaatagaaaactcccaaacccagcactccagactcgagggaagccagcttccaagaactggaatgcgtacgtcttttgtgccaccttgtacaaagccggctgcccagccccagcctcaccaccgcatcccacctcctgccctccatacctctagttgtgtctgatgctccgtgctgttcgggaattgttttatgtacacttgtcaggcagaaaaggtagtgaccggcccggcgtgggcacacagacagcccgctttgttctttcatttcctccagcactttctttccgcctgagtccagcccaaggccttttattttgcgctgtgtaactgctgccagcttctctcttggccctgctcccagatggcggtctcctggcagcctcccctcagtcttcctccacccgcctcttccttcccagcctgcctgcatgcatgtgcacccttggtcttcgctccatcgccttgaaagctctgaagaggccctgggttgtcgcggcagcagtggtctgtttgatgctgccgtttgccgctgccggcccctcctcagactccgcctttgggagcacacctgctttgccttgctgcctgtgcaaatgttggacaagcagacacactcacactcgtccccagcttagcacagagctggagcgcccatttctggaattttccgtttgggaatctccacttctggggtttacctgttcggcctcctgcctatcagtgaggcatctctgactgttccttctactgcttttcagttcccttccctgctgttctatttcctttgagtgtaaagactcacaggtgacctgctatcgagatagccagagggtcaggagagaatgggggaggaggcggtcaggctgctgaggaaacaccacaggctgaacgggggaggaatgcacatgccacgctgggtgtcccgggtcgcggggaggcagctcagctcttaggagcaagttgtgggggcttttcaagaggggccaggcttcctggagggtgactgatgtggccgaagcaggtgtccaggcaggtaggctgcagccaggagctccctggcaccgcaggacctcgtggtactcttgccttagattttacacacactccacagccaagcactgccacggtcctccaggacctgggaagcaaaggcacaggcccacggtggccagccattgtggtgccgccccagcttctggatacagccttttgggtaaacactgggaactccagaagttgtggggagagtggggaatcagacagccgcctctaggggctgggttctgctggggcctccttgttggtgctgtaggcacccgccaggagcagggacccgacttgcagacgcattgcccggtactaggaaggagtgaggtgtgttcccaccgtacacttcccacacgagctgcggctgccagcctcgggccatcagcctaggagagcagatgcagctccaggggctcgacttatagccagttacagctccccggctcttctgtgtggcagagcgtcgtttccgggccctcagggctggggagctcagttcccattgcttgtgctcagggctgagtcttaaagaagggtttgccggccctaacgctgcagccgtgctgagaggccctttttgagcctgtttactcctgtggccttgggcagaacagtaaatactctgtgcacggaggaaagacatgcccaagaggaaggaagtactgaccatcggctgcctgtgagcagcttagcaaggagcccttgctccctgggaaaggcggtgaacttgagtctaaagatgcagtgcctggcccttcctaaggtccctgcctggcatccgagtgtcggtgtgtggcacagaaggctcctgcttgcttccaaagtgatggacaggaaggggcagagtgagtcacggcccagactgcgaccttcacgtctcagcctcagggagccccacagccccaagctcgctgaggcaacgtgagaacaggctatgggaaggctgcaaaggctgagaaatgcaaaggctcatatttataaatcccacccccagagtggggagggtcaggtgccagacctggactaaactgcaccaaggaaacacccagcagggtctcctgtgagccggggaccatgcagcccgaaacctccagtcactgcgcccggcaggagtcaggagccagggactgtgcagcctggaacctccagtcactgtgccagcagggtggctgtgcccagcaggagtcaggctaagaaacgccaggtctgcctgttcttgctgggcaatggctgatggctgccagtttctgctgatacacaggtaggatgggacccttcatgaatatctgactttaataagttggtaaggatatatttttttgtctatgttctgtttcaacttatgtagattattataaattgatgtaaaccacgtgagaggaaaatgttaataaaaaatgcaaagccccatcatttgcacaaaactcaaaaaaaaaaaaaaaaaaaaaaa

SEQ ID NO: 3545 - DNA, 2790 bp, Homo sapiens
gcagagcgggacagccaggaggaagggcagcttggcagagcctcaggatggacccccttggggacacgctgcggcgactgcgggaggccttccacgcggggcgcacgcggccagctgagttccgggctgcgcagctccaaggcctgggccgcttcctgcaagaaaacaagcagcttctgcacgacgcactggcccaggacctgcacaagtcagccttcgagtcggaggtgtctgaggttgccatcagccagggcgaggtcaccctggccctcaggaacctccgggcctggatgaaggacgagcgtgtgcccaagaacctggccacgcagctggactccgccttcatccggaaggagccctttggcctggtcctcatcattgcgccctggaactatccgctgaacctgacgctggtgcccctcgtgggagccctcgctgcagggaactgtgtggtgctgaagccatcggagattagcaagaacgtcgagaagatcctggccgaggtgctgccccaatacgtggaccagagctgctttgctgtggtgctgggcgggccccaggagacggggcagctgctagagcacaggttcgactacatcttcttcacagggagccctcgtgtgggcaagattgttatgactgctgccgccaagcacctgacacctgtcaccctggagctggggggcaagaacccttgctacgtggacgacaactgcgacccccagaccgtggccaaccgcgtggcctggttccgctacttcaacgccggccagacctgcgtggcccccgactacgtcctatgcagccctgagatgcaggagaggctgctgcctgccctgcagagcaccatcacccgtttctatggcgacgacccccagagctccccaaacctgggccgcatcatcaaccagaaacagttccagcggctgcgggcattgctgggctgcggccgtgtggccattgggggccagagcgatgagagcgatcgctacatcgcccccacggtgctggtggatgtgcaggagatggagcctgtgatgcaggaggagatcttcgggcccatcctgcccatcgtgaacgtgcagagcttggacgaggccatcgagttcatcaaccggcgggagaagcccctggccctgtacgccttctccaacagcagccaggtggtcaagcgggtgctgacccagaccagcagcgggggcttctgtgggaacgacggcttcatgcacatgaccctggccagcctgccttttggaggagtgggtgccagtgggatgggccggtaccatggcaagttctccttcgacaccttctcccaccatcgcgcctgcctcctgcgcagcccggggatggagaagctcaacgccctccgctacccgccgcaatcgccgcgccgcctgaggatgctgctggtggccatggaggcccaaggctgcagctgcacactgctctgagcccttccccaggcccaggctgtagaccaccatgacagctgtcgcctgcggctggtggagacggggcctgggctcccgggcccgaggaggaaaaggattgccaaggctccagggcacccctcaaagcagcgcctgcctcctccctcctgggtcttccctctccctgcctcagcctcctccctcagccgctcccaaccatgagagccgaggtgggaggcatgggaaacagtgcagtgactcaccccctgcccccgcaccaaccacccatattcaggagaagaggacagacacggcacctctgagtcacccctctcctgtggagcgggcgtccgaggggcctggcgatctgactcaggccacaccatggaatcactgcatccaaggccattcctgccctctctgagtctcagtttttccatttgttcagtggagagaattaaccattgatacctcctggctgggtgaggcggctcacacctgtaatcccagcactttgggaggccgaggcaggcggatcacctgaaatcaggagttcaagatcagcctggctaacatggcgaaaccccgtctctactaaaaatacaaaaattagcctggcgtggtggcgcatgcctgtaatcccagctactcaggaggctaaggcaggagaatcgcttgaacccgggaggtggaggttgccgtgagctgagattgcgtcactgaactccggcctgggtgacagaaggaggctctgccttaaaaaaaaaaaaaaaaaaaaaaacctcctgggactgttgcaaggatgaaatgaaggattgagggattgagggattgctgagctggagctccaggtgtcctatctttctcagtggggtggcacggagcggggccgcctccctcttctctccaggcaggtggggctgtggttatgcgatagggtctcccttccctccagcccatgccaggagcttgtaactctttatcctcatggtgcccactacgagtcatactcttccccatgctgctcatcctcctgggccccatccactcagccaaagcagaatgcagggtttcctgcctgacaacccttctcacctcccaagtcccacttttgaacaagctgatgattctgaaactggcccaatttcctaaaagcgggggtgcttgagaaacctacatttggacaatgagaggctgctcctgcggcctgcgggccacctcctcttccttggctcctgctttctttttagactatatcaacctacaactttagtcgggaagagggacaggggtggacctgagtttcgtctcctgtctctctggctgatgtcacctgaataaagccttcttccctggc

SEQ ID NO: 3546 - DNA, 2280 bp, Homo sapiens; identical to SEQ ID NO: 233

SEQ ID NO: 3547 - DNA, 2387 bp, Homo sapiens
actctgccctgttgctgtcgcgccgctgctggttgctgtccctggacccctaccatggaggagaccatcaaagatccccccacatcagctgtcttgctggatcactgtcatttctctcaggtcatctttaacagtgtggagaagttctacatccctggaggggacgtcacatgtcattataccttcacccagcatttcatccctcgtcgaaaggattggattggcatctttagagtggggtggaagacaacccgtgagtattacaccttcatgtgggttactttgcccattgacctaaacaacaaatcagctaaacagcaggaagtccaattcaaagcttactacctgcccaaggatgatgagtattaccagttctgctatgtggatgaggatggtgtggtccggggagcaagtattcctttccaattccgtccagaaaatgaggaagacatcctggttgttaccactcagggagaggtggaagagattgagcagcacaacaaggagctttgcaaagaaaaccaggagctgaaggacagctgtatcagcctccagaagcagaactcagacatgcaggctgagctccaaaagaagcaggaggagctagaaaccctacagagcatcaataagaagttggaactgaaagtgaaagaacagaaggactattgggagacagagctgcttcaactgaaagaacaaaaccagaagatgtcctcagaaaatgagaagatgggaatcagagtggatcagcttcaggcccagctgtcaactcaagagaaagaaatggagaagcttgttcagggagatcaagataagacagagcagttagagcagctgaaaaaggaaaatgaccacctctttctcagtttaactgaacagaggaaggaccagaagaagctcgagcagacagtggagcaaatgaagcagaatgaaactactgcaatgaagaaacaacaggaattaatggatgaaaactttgacctgtcaaaaagactgagtgagaacgaaattatatgtaatgctctgcagagacagaaagagagattggaaggagaaaatgatcttttgaagagggagaacagcagattgctcagttacatgggtctggattttaattctttgccgtatcaagtacctacttcagatgaaggaggcgcaagacaaaatccaggacttgcctatggaaacccatattctggtatccaagaaagttcttcccccagcccgctctccatcaagaaatgccctatctgcaaagcagatgatatttgtgatcacaccttggagcaacagcagatgcagcccctttgtttcaattgtccaatttgtgacaagatcttcccagctacagagaagcagatctttgaagaccacgtgttctgccactctctctgagtatcccaacctcttggatgtatacagagattttatagaatagaacctatagcttctaccatgagttatatgagtcaagatcctgcctaacctgaaattattagggatttactcagccctgctgccgctaacagtggagttatgtcactgatctgaaggtcactgttaagggcttctgctgccatccttgtgggttgctacctttaagtcgcataactctagctgtatcatcctctcacctgtcattcttctgagggtctcagtacaagggccctgggatggagccaacctgggtattcacaacaggcctgacttgatactaagtgattagttttccaagttgtcccactgccattcaaagtcagcccttgagtgtatttgttctcagtcctaaccctggggccagagattggtccgaggttgagaattccttcctcctcatccttggtgttgctttctccaaatgattgttttagactagccaaaaatgccgtggcaaagagctcagaaatccaatttggataccaaaggtttctcatgttaatttctcagcccccaaagaagcatcttactcctgaaccttagacaggaagtattgtttcagtcacagaaagcttttctgggtacctctggttagcactttctactctctgatatttcctatgtacatagcttttattgttgtaaatcctttcttaatggttaaataggattgttagcaactatgggtttgcagttttctgagtaggtgagttttgaatatgggtaaatcagaataatgagacaacttgttaatctctttaatactaaaaataaattactcttctatttcagggacttaggtaatttaaaataaaccttcaatttatggtcttctgttttgaagctcatgggaaaattgtgatcaaaagggctatgggaagggcagaccccgccaatgatttctcttcacctgtcttaagattaaataaaaaagagtgtcctggcagtta

SEQ ID NO: 3548 - DNA, 4040 bp, Homo sapiens; identical to SEQ ID NO: 241

SEQ ID NO: 3549 - DNA, 5926 bp, Homo sapiens; identical to SEQ ID NO: 247

SEQ ID NO: 3550 - DNA, 4040 bp, Homo sapiens; identical to SEQ ID NO: 267

SEQ ID NO: 3551 - DNA, 2907 bp, Homo sapiens
gccatctgggcccaggccccatgccccgaggaggggtggtctgaagcccaccagagccccctgccagactgtctgcctcccttctgactgtggccgcttggcatggccagcaacagcagctcctgcccgacacctgggggcgggcacctcaatgggtacccggtgcctccctacgccttcttcttcccccctatgctgggtggactctccccgccaggcgctctgaccactctccagcaccagcttccagttagtggatatagcacaccatccccagccaccattgagacccagagcagcagttctgaagagatagtgcccagccctccctcgccaccccctctaccccgcatctacaagccttgctttgtctgtcaggacaagtcctcaggctaccactatggggtcagcgcctgtgagggctgcaagggcttcttccgccgcagcatccagaagaacatggtgtacacgtgtcaccgggacaagaactgcatcatcaacaaggtgacccggaaccgctgccagtactgccgactgcagaagtgctttgaagtgggcatgtccaaggagtctgtgagaaacgaccgaaacaagaagaagaaggaggtgcccaagcccgagtgctctgagagctacacgctgacgccggaggtgggggagctcattgagaaggtgcgcaaagcgcaccaggaaaccttccctgccctctgccagctgggcaaatacactacgaacaacagctcagaacaacgtgtctctctggacattgacctctgggacaagttcagtgaactctccaccaagtgcatcattaagactgtggagttcgccaagcagctgcccggcttcaccaccctcaccatcgccgaccagatcaccctcctcaaggctgcctgcctggacatcctgatcctgcggatctgcacgcggtacacgcccgagcaggacaccatgaccttctcggacgggctgaccctgaaccggacccagatgcacaacgctggcttcggccccctcaccgacctggtctttgccttcgccaaccagctgctgcccctggagatggatgatgcggagacggggctgctcagcgccatctgcctcatctgcggagaccgccaggacctggagcagccggaccgggtggacatgctgcaggagccgctgctggaggcgctaaaggtctacgtgcggaagcggaggcccagccgcccccacatgttccccaagatgctaatgaagattactgacctgcgaagcatcagcgccaagggggctgagcgggtgatcacgctgaagatggagatcccgggctccatgccgcctctcatccaggaaatgttggagaactcagagggcctggacactctgagcggacagccggggggtggggggcgggacgggggtggcctggcccccccgccaggcagctgtagccccagcctcagccccagctccaacagaagcagcccggccacccactccccgtgaccgcccacgccacatggacacagccctcgccctccgccccggcttttctctgcctttctaccgaccatgtgaccccgcaccagccctgcccccacctgccctcccgggcagtactggggaccttccctgggggacggggagggaggaggcagcgactccttggacagaggcctgggccctcagtggactgcctgctcccacagcctgggctgacgtcagaggccgaggccaggaactgagtgaggcccctggtcctgggtctcaggatgggtcctgggggcctcgtgttcatcaagacacccctctgcccagctcaccacatcttcatcaccagcaaacgccaggacttggctcccccatcctcagaactcacaagccattgctccccagctggggaacctcaacctcccccctgcctcggttggtgacagagggggtgggacaggggcggggggttccccctgtacataccctgccataccaaccccaggtattaattctcgctggttttgtttttattttaatttttttgttttgatttttttaataagaattttcattttaagcacatttatactgaaggaatttgtgctgtgtattggggggagctggatccagagctggagggggtgggtccgggggagggagtggctcggaaggggcccccactctcctttcatgtccctgtgccccccagttctcctcctcagccttttcctcctcagttttctctttaaaactgtgaagtactaactttccaaggcctgccttcccctccctcccactggagaagccgccagcccctttctccctctgcctgaccactgggtgtggacggtgtggggcagccctgaaaggacaggctcctggccttggcacttgcctgcacccaccatgaggcatggagcagggcagagcaagggccccgggacagagttttcccagacctggctcctcggcagagctgcctcccgtcagggcccacatcatctaggctccccagcccccactgtgaaggggctggccaggggcccgagctgcccccacccccggcctcagccaccagcacccccatagggcccccagacaccacacacatgcgcgtgcgcacacacacaaacacacacacactggacagtagatgggccgacacacacttggcccgagttcctccatttccctggcctgccccccacccccaacctgtcccacccccgtgccccctccttaccccgcaggacgggcctacaggggggtctcccctcacccctgcacccccagctgggggagctggctctgccccgacctccttcaccaggggttggggccccttcccctggagcccgtgggtgcacctgttactgttgggctttccactgagatctactggataaagaataaagttctatttattct

SEQ ID NO: 3552 - DNA, 695 bp, Homo sapiens
tagttaaaatctcccaaattcatattacaggaggatcccttttcccccagaaattactcaatgctgaaacctctcaaagtggtattagagacgctgaaagcaccatggacgggttttatgatcagcaagtcccttttatggtcccaggggtaagtttatgtggcttttggtttgttttgtcctccctctccaatatgagtcttccccctgtggacctctttactacacttgagccttcactttctgttggcctctttcagaaatctcgatctgaggaatgcagagggcggcctgtgattgacagaaagaggaagtttttggacacagatctggctcacgattctgaaggtagtaaagctttccctgattatgttgtggcttccctgctcccagtgacagtagcgtgtagattcttccctgtcttctccctagcgaaagaaatatcctcattctggggtcttctttttcaatttcagagctatttcaggatctcagtcaacttcaagaggcttggttagctgaaggcaagtttcatggatgtcctattttccatataaaacattttactgtgctttttaataaaacttaaaggtctaaaataaaaatctattttccagcacaagttcctgatgatgaacagtttgtcccagattttcagtctgataaccgtaagtacctttctggtgatggcacat

SEQ ID NO: 3553 - DNA, 1713 bp, Homo sapiens
ccaagggagaaaactattctgtcaaagagacggtgccaaaaggcaaaaacaaaggagctgatggcaaagaaggtagctgtgattggagctggggtcagtggcctaatttctctgaagtgctgtgtggatgagggacttgagcccacttgctttgagagaactgaagatattggaggagtgtggaggttcaaagagaatgtggaagatggccgagcaagtatctatcaatctgtcgttaccaacaccagcaaagaaatgtcctgtttcagtgactttccaatgcctgaagattttccaaacttcctgcataattctaaacttctggaatatttcaggatttttgctaaaaaatttgatctgctaaaatatattcagttccagacaactgtccttagtgtgagaaaatgtccagatttctcatcctctggccaatggaaggttgtcactcagagcaacggcaaggagcagagtgctgtctttgacgcagttatggtttgcagtggccaccacattctacctcatatcccactgaagtcatttccaggtatggagaggttcaaaggccaatatttccatagccgccaatacaagcatccagatggatttgagggaaaacgcatcctggtgattggaatgggaaactcaggctcagatattgctgttgagctgagtaagaatgctgctcaggtttttatcagcaccaggcatggcacctgggtcatgagccgtatctctgaagatggctatccttgggactcagtgttccacacccggtttcgttctatgctccgcaatgtactgccacgaacagctgtaaaatggatgatagaacaacagatgaatcggtggttcaaccatgaaaattatggccttgagcctcaaaacaaatacattatgaaggaacctgtactaaatgatgatgtcccaagtcgtctactctgtggagccatcaaggtgaaatctacagtgaaagagctcacagaaacttctgccatctttgaggatggaacagtggaggagaacattgatgtcatcatttttgcaacaggatatagtttctcttttcccttccttgaagattcactcgttaaagtagagaataatatggtctcactgtataaatacatattccccgctcacctggacaagtcaaccctcgcgtgcattggtctcatccagcccctaggttccattttcccaactgctgaacttcaagctcgttgggtgacaagagttttcaaaggcttgtgtagcctgccctcagagagaactatgatgatggacattatcaaaaggaatgaaaaaagaattgacctgtttggagaaagccagagccagacgttgcagaccaattatgttgactacttggacgagctcgccttagagataggtgcgaagccagatttctgctctctcttgttcaaagatcctaaactggctgtgagactctatttcggaccctgcaactcctattagtatcgcctggttgggcctgggcaatgggaaggagccagaaatgccatcttcacccagaaacaaagaatactgaagccactcaagactcgggccctgaaggattcatctaatttctcagtttcttttctgttgaaaatcctgggccttcttgctgttgttgtggcctttttttgccaacttcaatggtcctagtcagcataatgctttgggctttattatcttgtcagtcactacctc

SEQ ID NO: 3554 - DNA, 2146 bp, Homo sapiens
cccaagatggaagggagcggcggccgcgtccgcctcaaggcgcattacgggggggacatcttcatcaccagcgtggacgccgccacgaccttcgaggagctctgtgaggaagtgagagacatgtgtcgtctgcaccagcagcacccgctcaccctcaagtgggtggacagcgaaggtgacccttgcacggtgtcctcccagatggagctggaagaggctttccgcctggcccgtcagtgcagggatgaaggcctcatcattcatgttttcccgagcacccctgagcagcctggcctgccatgtccgggagaagacaaatctatctaccgccggggagccagaagatggaggaagctgtaccgtgccaacggccacctcttccaagccaagcgctttaacaggagagcgtactgcggtcagtgcagcgagaggatatggggcctcgcgaggcaaggctacaggtgcatcaactgcaaactgctggtccataagcgctgccacggcctcgtcccgctgacctgcaggaagcatatggattctgtcatgccttcccaagagcctccagtagacgacaagaacgaggacgccgaccttccttccgaggagacagatggaattgcttacatttcctcatcccggaagcatgacagcattaaagacgactcggaggaccttaagccagttatcgatgggatggatggaatcaaaatctctcaggggcttgggctgcaggactttgacctaatcagagtcatcgggcgcgggagctacgccaaggttctcctggtgcggttgaagaagaatgaccaaatttacgccatgaaagtggtgaagaaagagctggtgcatgatgacgaggatattgactgggtacagacagagaagcacgtgtttgagcaggcatccagcaaccccttcctggtcggattacactcctgcttccagacgacaagtcggttgttcctggtcattgagtacgtcaacggcggggacctgatgttccacatgcagaggcagaggaagctccctgaggagcacgccaggttctacgcggccgagatctgcatcgccctcaacttcctgcacgagagggggatcatctacagggacctgaagctggacaacgtcctcctggatgcggacgggcacatcaagctcacagactacggcatgtgcaaggaaggcctgggccctggtgacacaacgagcactttctgcggaaccccgaattacatcgcccccgaaatcctgcggggagaggagtacgggttcagcgtggactggtgggcgctgggagtcctcatgtttgagatgatggccgggcgctccccgttcgacatcatcaccgacaacccggacatgaacacagaggactaccttttccaagtgatcctggagaagcccatccggatcccccggttcctgtccgtcaaagcctcccatgttttaaaaggatttttaaataaggaccccaaagagaggctcggctgccggccacagactggattttctgacatcaagtcccacgcgttcttccgcagcatagactgggacttgctggagaagaagcaggcgctccctccattccagccacagatcacagacgactacggtctggacaactttgacacacagttcaccagcgagcccgtgcagctgaccccagacgatgaggatgccataaagaggatcgaccagtcagagttcgaaggctttgagtatatcaacccattattgctgtccaccgaggagtcggtgtgaggccgcgtgcgtctctgtcgtggacacgcgtgattgaccctttaactgtatccttaaccaccgcatatgcatgccaggctgggcacggctccgagggcggccagggacagacgcttgcgccgagaccgcagagggaagcgtcagcgggcgctgctgggagcagaacagtccctcacacctggcccggcaggcagcttcgtgctggaggaacttgctgctgtgcctgcgtcgcggcggatccgcggggaccctgccgagggggctgtcatgcggtttccaaggtgcacattttccacggaaacagaactcgatgcactgacctgctccgccaggaaagtgagcgtgtagcgtcctgaggaataaaatgttccgatgaaaaaaaaaa

SEQ ID NO: 3555 - DNA, 4163 bp, Homo sapiens
ttgatttggtatagtgggaacatttgctttggagacagatgaactggattctgatcgtgaccctgctattttctccttgtgtgactttggagccatgagaccccagatcctgctgctcctggccctgctgaccctaggcctggctgcacaacaccaagacaaagtgccctgtaagatggtggacaagaaggtctcgtgccaggttctgggcctgctccaggtcccctcggtgctcccgccagacactgagacccttgatctatctgggaaccagctgcggagtatcctggcctcacccctgggcttctacacggcacttcgtcacctggacctgagcaccaatgagatcagcttcctccagccaggagccttccaggccctgacccacctggagcacctcagcctggctcacaaccggctggcgatggccactgcgctgagtgctggtggcctgggccccctgccacgcgtgacctccctggacctgtctgggaacagcctgtacagcggcctgctggagcggctgctgggggaggcacccagcctgcataccctctcactggcggagaacagtctgactcgcctcacccgccacaccttccgggacatgcctgcgctggagcagcttgacctgcatagcaacgtgctgatggacatcgaggatggcgccttcgagggcctgccccgcctgacccatctcaacctctccaggaattccctcacctgcatctccgacttcagcctccagcagctgcgggtgctagacctgagctgcaacagcatcgaggcctttcagacggcctcccagccccaggctgagttccagctcacctggcttgacctgcgggagaacaaactgctccatttccccgacctggccgcgctcccgagactcatctacctgaacttgtccaacaacctcatccggctccccacagggccaccccaggacagcaagggcatccacgcaccttccgagggctggtcagccctgcccctctcagcccccagcgggaatgccagcggccgccccctttcccagctcttgaatctggatttgagctacaatgagattgagctcatccccgacagctttcttgagcacctgacctccctgtgcttcctgaacctcagcagaaactgcttgcggacctttgaggcccggcgcttaggctccctgccctgcctgatgctccttgacttaagccacaatgccctggagacactggaactgggcgccagagccctggggtctctgcggacgctgctcctacagggcaatgccctgcgggacctgcccccatacacctttgccaatctggccagcctgcagcggctcaacctgcaggggaaccgagtcagcccctgtggggggccagatgagcctggcccctccggctgtgtggccttctccggcatcacctccctccgcagcctgagcctggtggataatgagatagagctgctcagggcaggggccttcctccacaccccactgactgagctggacctttcttccaatcctgggctggaggtggccacgggggccttgggaggcctggaggcctccttggaggtcctggcactgcagggcaacgggctgatggtcctgcaggtggacctgccctgcttcatctgcctcaagcggctcaatcttgccgagaaccgcctgagccaccttcccgcctggacacaggctgtgtcactggaggtgctggacctgcgaaacaacagcttcagcctcctgccaggcagtgccatgggtggcctggagaccagcctccggcgcctctacctgcaggggaatccactcagctgctgcggcaatggctggctggcagcccagctgcaccagggccgtgtggacgtggacgccacccaggacctgatctgccgcttcagctcccaggaggaggtgtccctgagccacgtgcgtcccgaggactgtgagaaggggggactgaagaacatcaacctcatcatcatcctcaccttcatactggtctctgccatcctcctcaccacgctggccgcctgctgctgcgtccgccggcagaagtttaaccaacagtataaagcctaaagaagccgggagacactctaggtcagtgggggagcctgaggtacagagaagagtgaggactgactcaaggtcacacagtgatccggatcccagaactctggtctccaaattacagcccaggacacctttctctgccgcctgctgcatcagtgggtgacccccttcccgggctgcactttgggtccagctgtggaagccagaagttgggcggtttcagggacagccgagaataatgttgacctgtcagatcaacaaatcttcactgagcatgtattttgtgccacaccctgctctgggcactgggaatgctgggaaatgagatacattcccgccctcaagaatctcccagtctggtaggagagagtgctgcagagccacgtggccgccacgcagtgtgcttagggcctgaggtgtgaaagcccagggctccagagctcggcaggccccgctggtttggtgcggtgagtcctgccccggctgtgcagggtgagggagggccaagccaggaggatttgtctgagacatttccaagcagactgtttgtcacgtcttctgagaatgactttcagtctctctgaaaatgaaaagcttaggaccggaagagagaattggagctgtacgagtgtgtctcggatctggtattgttaggtgggccacggcggctccagcagggtctggttaaggggtccagcccagcactggaccattccgtctcctgctctggacttgccctctcccttcctggcactctcatgttgcataccctgaccccagtgctgctctaagcaccgtccctgcccagccccacttctccatcgcagccccaccttggctgctgagccaggagctaaaaccttagatatctggttctgttttgcacccagcttggcagatgtggatttgaatccaagccttgtgtctgcccctatgtgacagctctatattttatccccgttttataaaagaggaaactgaagttctgaaaatctccttccagggccccagctaactaatgccataggtgagattcaaaccttcatccttctgtctccagggcctgatctttaccactgcaggggctgcaggccgttaagtggacaggaagtggccccacatagcccgagcagggtctggaagcatcctgtgctgtgcacacctgctctctcctctctcccaggcaggcagctgcaggcgctctcctccttctctgcctgtttccctcctcccttcctttccaccctggtgtgggttctcctgttctctctgtgctcttgcattctctcattcccttttcctctatggagcagagcctggagtttgagactatggaatccaacctccccattgcacagatggggaaactgaggcttaggaagagaatgaaacttgtggagagcttatacagaacctctgggggaaaaaagagcccttatttgtggggtgagattgggggttggaccagagtgatgtcctctctcagctatcacatcacaagataatgctggctccaaacttcctttctgtgcctcatcatgcaaggatcttttttccctcttacaaaaacaggtaaaaagcctcacccagatgacccccatccctcataccatggagtcatgagctgtctgggaagaatggacgtgctgggaccaactcaagaccttgttttgctgtcttcatcatcttacctgtgcttggcccacagtctggctcatgatgtgggctcagtaatgtgcgagaaagtgaaaatgccactctctccaccccattttacagaggagaacaccaaggcccagaggaagttaagggagagtcaatgggcagagccagggctaggccctggtggtgtgtggagcacccaggcagacccagtcctggttgggatcacacccacgggtgctactgcacgtaacactcctccttaggcctggaggccaaggtgtgggtccccacgcctgatctttgaaaacactacacagggctgctgtcacttcccagggcccaggcctcagcccaggcctcgggaccaactctttgtataacctacctgaatgtattaaaaactaattttggaaaaaaaaaa

SEQ ID NO: 3556 - DNA, 43058 bp, Homo sapiens; identical to SEQ ID NO: 3319

SEQ ID NO: 3557 - DNA, 9517 bp, Homo sapiens; identical to SEQ ID NO: 92

SEQ ID NO: 3558 - DNA, 4409 bp, Homo sapiens; identical to SEQ ID NO: 236

SEQ ID NO: 3559 - DNA, 2532 bp, Homo sapiens; identical to SEQ ID NO: 296

SEQ ID NO: 3560 - DNA, 2276 bp, Homo sapiens
ccagctcagagcctagacctccagccgagcggtttgcagccgcgggcggcggcggcggcggcggcgttgagtgtctggcccgccggtccggtcggggtgtgcagtcggacggacgagcagcgcgtcgctgtcctccggcagctggagatgtccgagcccaaggcaattgatcccaagttgtcgacgaccgacagggtggtgaaagctgttccatttcctccaagtcaccggcttacagcaaaagaagtgtttgataatgatggaaaacctcgtgtggatatcttaaaggcgcatcttatgaaggagggaaggctggaagagagtgttgcattgagaataataacagagggtgcatcaattcttcgacaggaaaaaaatttgctggatattgatgcgccagtcactgtttgtggggacattcatggacaattctttgatttgatgaagctctttgaagtcgggggatctcctgccaacactcgctacctcttcttaggggactatgttgacagagggtacttcagtattgaatgtgtgctgtatttgtgggccttgaaaattctctaccccaaaacactgtttttacttcgtggaaatcatgaatgtagacatctaacagagtatttcacatttaaacaagaatgtaaaataaagtattcagaacgagtatatgatgcctgtatggatgcctttgactgccttcccctggctgccctgatgaaccaacagttcctgtgtgtgcatggtggtttgtctccagagattaacactttagatgatatcagaaaattagaccgattcaaagaaccacctgcatatggacctatgtgtgatatcctgtggtcagaccccctggaagattttggaaatgagaagactcaggaacatttcactcacaacacagtcagggggtgttcatacttctacagttacccggctgtatgtgaattcttacagcacaataacttgttatctatactccgagcccacgaagcccaagatgcagggtaccgcatgtacaggaaaagccaaacaacaggcttcccttctctaattacaattttttcagcaccaaattacttagatgtatacaataacaaagctgcagtattgaagtatgagaacaatgttatgaatatcaggcaattcaactgttctcctcatccatactggcttccaaatttcatggatgtttttacttggtcccttccatttgttggggaaaaagtgactgagatgctggtaaatgtcctcaacatctgctcagatgatgaactagggtcagaagaagatggatttgatggtgcaacagctgcagcccggaaagaggtgataaggaacaagatccgagcaataggcaaaatggccagagtgttctcagtgctcagagaagagagtgagagtgtgctgacgctgaaaggcttgaccccaactggcatgctccccagcggagtactttctggagggaagcaaaccctgcaaagcgctactgttgaggctattgaggctgatgaagctatcaaaggattttcaccacaacataagatcactagcttcgaggaagccaagggcttagaccgaattaatgagaggatgccgcctcgcagagatgccatgccctctgacgccaaccttaactccatcaacaaggctctcacctcagagactaacggcacggacagcaatggcagtaatagcagcaatattcagtgaccacttcctgttcacattttttttttttttttttttttttttttttttgagctgcggggcatgatggggattgctgcatatcagcagttggatgttcttgcctctgacagtagcttatttgctctgggggccaggaattggattcagtttacactatcattaaaaaagagggagagagataataaactatattttggtggggatggtgattaaacacctcttttgggtatgccttttaaaaatgcttatagagaaaaaaaattttaaaaaaagaaagctaatgctagtatatactgcaatgttaggggaatgaacatgttttcctactgcattggggacttctagataggttaatgaaaggccttttattctgttactggacatgaaaactttgtctaatttcttactctattgtacgtttacagtcgcagcactaaaaatggatgacatcaaacatttttaacaaaatgatgatgtacaaactaaggactatttattgataatgttttgctactcttgtcagacaatggctataaactgaattaggcagtcttaaaaaaaaa

SEQ ID NO: 3561 - DNA, 2244 bp, Homo sapiens; identical to SEQ ID NO: 3027

SEQ ID NO: 3562 - DNA, 2300 bp, Homo sapiens
cagcacgtctcttgctcctcagggccactgccaggcttgccgagtcctgggactgctctcgctccggctgccactctcccgcgctctcctagctccctgcgaagcaggatggccgggaccgtgcgcaccgcgtgcttggtggtggcgatgctgctcagcttggacttcccgggacaggcgcagcccccgccgccgccgccggacgccacctgtcaccaagtccgctccttcttccagagactgcagcccggactcaagtgggtgccagaaactcccgtgccaggatcagatttgcaagtatgtctccctaagggcccaacatgctgctcaagaaagatggaagaaaaataccaactaacagcacgattgaacatggaacagctgcttcagtctgcaagtatggagctcaagttcttaattattcagaatgctgcggttttccaagaggcctttgaaattgttgttcgccatgccaagaactacaccaatgccatgttcaagaacaactacccaagcctgactccacaagcttttgagtttgtgggtgaatttttcacagatgtgtctctctacatcttgggttctgacatcaatgtagatgacatggtcaatgaattgtttgacagcctgtttccagtcatctatacccagctaatgaacccaggcctgcctgattcagccttggacatcaatgagtgcctccgaggagcaagacgtgacctgaaagtatttgggaatttccccaagcttattatgacccaggtttccaagtcactgcaagtcactaggatcttccttcaggctctgaatcttggaattgaagtgatcaacacaactgatcacctgaagttcagtaaggactgtggccgaatgctcaccagaatgtggtactgctcttactgccagggactgatgatggttaaaccctgtggcggttactgcaatgtggtcatgcaaggctgtatggcaggtgtggtggagattgacaagtactggagagaatacattctgtcccttgaagaacttgtgaatggcatgtacagaatctatgacatggagaacgtactgcttggtctcttttcaacaatccatgattctatccagtatgtccagaagaatgcaggaaagctgaccaccactattggcaagttatgtgcccattctcaacaacgccaatatagatctgcttattatcctgaagatctctttattgacaagaaagtattaaaagttgctcatgtagaacatgaagaaaccttatccagccgaagaagggaactaattcagaagttgaagtctttcatcagcttctatagtgctttgcctggctacatctgcagccatagccctgtggcggaaaacgacaccctttgctggaatggacaagaactcgtggagagatacagccaaaaggcagcaaggaatggaatgaaaaaccagttcaatctccatgagctgaaaatgaagggccctgagccagtggtcagtcaaattattgacaaactgaagcacattaaccagctcctgagaaccatgtctatgcccaaaggtagagttctggataaaaacctggatgaggaagggtttgaaagtggagactgcggtgatgatgaagatgagtgcattggaggctctggtgatggaatgataaaagtgaagaatcagctccgcttccttgcagaactggcctatgatctggatgtggatgatgcgcctggaaacagtcagcaggcaactccgaaggacaacgagataagcacctttcacaacctcgggaacgttcattccccgctgaagcttctcaccagcatggccatctcggtggtgtgcttcttcttcctggtgcactgactgcctggtgcccagcacatgtgctgccctacagcaccctgtggtcttcctcgataaagggaaccactttcttatttttttctatttttttttttttgttatcctgtatacctcctccagccatgaagtagaggactaaccatgtgttatgttttcgaaaatcaaatggtatcttttggaggaagatacattttagtggtagcatatagattgtccttttgcaaagaaagaaaaaaaaccatcaagttgtgccaaattattctcctatgtttggctgctagaacatggttaccatgtctttctctctcactccctccctttctatcgttctctctttgcatggatttctttgaaaaaaaataaattgctcaaataaaaaaaaaaaaaaaaaaaaaaaaaaaaaaaaaaaaaaaaaaaaaaaaaaaaaaaaaaaaaaaaaaaaaaaaaaa

SEQ ID NO: 3563 - DNA, 1450 bp, Homo sapiens; identical to SEQ ID NO: 706

SEQ ID NO: 3564 - DNA, 914 bp, Homo sapiens; identical to SEQ ID NO: 3242

SEQ ID NO: 3565 - DNA, 565 bp, Homo sapiens; identical to SEQ ID NO: 2757

SEQ ID NO: 3566 - DNA, 2102 bp, Homo sapiens
ccgctgggcgtagctgcgactcggcggagtcccggcggcgcgtccttgttctaacccggcgcgccatgaccgtcgcgcggccgagcgtgcccgcggcgctgcccctcctcggggagctgccccggctgctgctgctggtgctgttgtgcctgccggccgtgtggggtgactgtggccttcccccagatgtacctaatgcccagccagctttggaaggccgtacaagttttcccgaggatactgtaataacgtacaaatgtgaagaaagctttgtgaaaattcctggcgagaaggactcagtgatctgccttaagggcagtcaatggtcagatattgaagagttctgcaatcgtagctgcgaggtgccaacaaggctaaattctgcatccctcaaacagccttatatcactcagaattattttccagtcggtactgttgtggaatatgagtgccgtccaggttacagaagagaaccttctctatcaccaaaactaacttgccttcagaatttaaaatggtccacagcagtcgaattttgtaaaaagaaatcatgccctaatccgggagaaatacgaaatggtcagattgatgtaccaggtggcatattatttggtgcaaccatctccttctcatgtaacacagggtacaaattatttggctcgacttctagtttttgtcttatttcaggcagctctgtccagtggagtgacccgttgccagagtgcagagaaatttattgtccagcaccaccacaaattgacaatggaataattcaaggggaacgtgaccattatggatatagacagtctgtaacgtatgcatgtaataaaggattcaccatgattggagagcactctatttattgtactgtgaataatgatgaaggagagtggagtggcccaccacctgaatgcagaggaaaatctctaacttccaaggtcccaccaacagttcagaaacctaccacagtaaatgttccaactacagaagtctcaccaacttctcagaaaaccaccacaaaaaccaccacaccaaatgctcaagcaacacggagtacacctgtttccaggacaaccaagcattttcatgaaacaaccccaaataaaggaagtggaaccacttcaggtactacccgtcttctatctgggcacacgtgtttcacgttgacaggtttgcttgggacgctagtaaccatgggcttgctgacttagccaaagaagagttaagaagaaaatacacacaagtatacagactgttcctagtttcttagacttatctgcatattggataaaataaatgcaattgtgctcttcatttaggatgctttcattgtctttaagatgtgttaggaatgtcaacagagcaaggagaaaaaaggcagtcctggaatcacattcttagcacacctacacctcttgaaaatagaacaacttgcagaattgagagtgattcctttcctaaaagtgtaagaaagcatagagatttgttcgtatttagaatgggatcacgaggaaaagagaaggaaagtgatttttttccacaagatctgtaatgttatttccacttataaaggaaataaaaaatgaaaaacattatttggatatcaaaagcaaataaaaacccaattcagtctcttctaagcaaaattgctaaagagagatgaaccacattataaagtaatctttggctgtaaggcattttcatctttccttcgggttggcaaaatattttaaaggtaaaacatgctggtgaaccaggggtgttgatggtgataagggaggaatatagaatgaaagactgaatcttcctttgttgcacaaatagagtttggaaaaagcctgtgaaaggtgtcttctttgacttaatgtctttaaaagtatccagagatactacaatattaacataagaaaagattatatattatttctgaatcgagatgtccatagtcaaatttgtaaatcttattcttttgtaatatttatttatatttatttatgacagtgaacattctgattttacatgtaaaacaagaaaagttgaagaagatatgtgaagaaaaatgtatttttcctaaatagaaataaatgatcccattttttggt

SEQ ID NO: 3567 - DNA, 915 bp, Homo sapiens
atgtggtcgacgagaagccccaacagcacggcgtggcctctcagcctcgagcctgatccggggatggcctctgcctccaccacaatgcatactaccaccattgcagagcctgatccagggatgtctggatggccggatggcagaatggagacctccacccccaccataatggacattgtcgtcattgcaggtgtgattgctgctgtggccatcgtcctagtctccctcctcttcgtcatgctgcgctacatgtaccggcacaagggcacgtaccacaccaatgaggccaagggcacggagtttgctgagagtgcagatgcagccctgcagggagaccctgccctccaagatgctggtgatagcagcagaaaggagtactttatttgagggacaacagacttcacttccctgaatgcctcccccatctccatcaggaaaaatacaccccatcgcccagtatccccgtcgataccaccagacagagagagagagtacacttgatttcttcccgagatagttacctagaaacactaggtgcctgcccaaggaggaacggaggaggactcgcgctacaagaggccactcccagggacccagggaggcgatggccaccccagaggccaccttttgctccacggaggtgggagagaatctgggcacatggggccccctagggcagtgcaggacaacatcagctcactggcaggaaagtccttgttgagggtgagggggtgctggggtacccgggggctggggaagcaaggaaataagtcatctgtatgctgactggggataatggcatcaatgtcagtccttgactttggggggaacagcaggtgccagagctaaaaggtacctttgtctgccattgatccagctaagaacgattggaaataaattggaaatgtaaccgag

SEQ ID NO: 3568 - DNA, 3285 bp, Homo sapiens
cggctcgctggtaccggcagtgccatggcggccttcagcaagtacttgacggcgcgaaactcctcgctggctggtgccgcgttcctgctgctctgcctgctccacaagcggcgccgcgccctcggcctgcacggtaagaaaagtggaaaaccaccattacagaataatgagaaagaaggaaaaaaagaacgagctgtggtggacaaagtgtttttctcaaggctcatacagatcctgaaaatcatggtccctagaacattttgtaaagagacaggttacttggtacttattgctgttatgctggtgtctcgaacatattgtgatgtttggatgattcaaaatgggacactaattgaaagtggtatcattggtcgtagcaggaaagatttcaagagatacttactcaacttcatcgctgccatgcctcttatctctctggttaataacttcttgaagtatgggttaaatgagcttaaactgtgcttccgagtaaggctcactaaatacctctatgaggagtatcttcaagccttcacatattataaaaaggggaatctggacaacagaatagctaatccagaccagctgcttacacaagatgtagaaaaattttgtaacagtgtagtcgatctgtattcaaatcttagtaagccatttttagacatagttttgtatatctttaagttaacgagtgcaattggagctcagggcccagcgagcatgatggcctacttggttgtttctgggctattcctaactcgacttcgaagacccattggtaagatgacaataactgagcaaaagtatgaaggagaatatagatatgttaattctcggctcatcacaaacagtgaagaaattgccttttacaatgggaataaaagagaaaagcagacagtccactcagtcttccgaaaactggtggaacacctacataatttcattttgtttcggttttcaatgggcttcattgatagtattattgccaaataccttgccactgttgttggttacctagttgtcagtcgccctttcttagatttgtctcatcctcgacatctcaagagtacacattcggaacttctagaggattactaccaaagtggaagaatgcttttgcgaatgtctcaagctctgggtcgaatagttttggctgggcgtgaaatgactagattggccggttttactgctcggattacagaattaatgcaagtactgaaggatttaaatcatggcaaatatgagcgcacaatggtctcacaacaggaaaagggtattgaaggagtacaagtcattcccttgatacctggtgctggagaaatcattattgcagataacattataaagtttgatcatgttcctttagcaacgccaaatggagatgttttgatccgagaccttaattttgaagttcgatctggggctaatgttctaatttgtggtccaaatggctgcggaaagagttcacttttccgtgttcttggtgaattatggcctctttttggaggacgtctaactaaacctgaaagaagaaaattattttatgttcctcagagaccttacatgacccttggaacacttcgagatcaagtgatatatccagatggacgagaagatcagaaaaggaagggaatttctgacctagtacagaaggaatacttagacaatgtccagttgggtcatatccttgaacgtgaaggaggctgggacagtgttcaggattggatggacgtactcagtggtggagaaaagcaaagaatggcgatggcaagattattttatcataaaccccagtttgccattttggatgaatgcacaagtgcagttagtgtcgacgtggaaggctacatttatagtcattgtcgaaaggttggcatcactctcttcactgtgtctcataggaaatctctttggaaacatcatgagtactacctgcatatggatggcagaggcaactatgaattcaaacagataacagaagatacagttgagtttggctcttagagaaatctggagaactatacctgcttcagtgaaataattacagaatatacttagaaaggcaaagtacattgtaaaataaagttgagcttagttttttttaaaaaaaaaaacaaagccaaccaaattatattagatacagaataatggagaacaagttgttaaaacatttaatattatataggatattgctaattgtgtatatgttggtttaattaataatatgtactaagaatgtccttattcttgtggttaaaaacctgcctaaattaaattgggcttcaatcatgtaacctgattcatcctgggatgtaaaccattcgaagtcagctaattggacttttatggctctatcttttccttcatgaagaaccctatttaaaactgggtcatcatttgtcctgttctagcaagatagtcttcagtttcatttcctgtgccctgtggtagttggaaaccatatcataatgtattatttaaatgtttaacatcattgcataacacgtttattatacagtggcagatttctttagctgccacagtaatactcattccttgtgtgtgtcttggagtgcatttgactccaggaaaagccattttggttttccttaactaaatgataaatgtacccctctcagtctgcagtattgagttgtttaaagtatatgtgcagtcttgcttacaaggaggggttaccatgtatcacacctaatcttcccaatgtttgggaatattaaaacaccaacagtccttaacatgccaggctcaaggtcttataagagttctagatttttaagagaattagacaaatttgtgtgtgttagaagcccattcattagaagtgtggtggttatttggtattaaactcaaacagtgccaagcttgggaaggcactacaatgaaataatgcactgagtatgcaatgctatcactgtctttgactgtgattttatgtttaaaaagtatgttctaaaattattatatatacatgggtgaattatgtttccgaggcactgttttatctctgtgaatcttgaataacttttttatatttgggttatgatgtcaaacgatcctaagcgaagatgatttcagttcatcaaatcatcattaatgactttatgtattatttgcacagggagaattgaaactgagtataatcaataagctagatacgaaatcagtttctcaaactgagcttcagaaaggggcattttgtactcttgtttttgcataactggttttgtttttttgcagaattaactataacaatcactggctacg

SEQ ID NO: 3569 - DNA, 2242 bp, Homo sapiens
ccgggataaaacgaggtgcggagagcgggctggggcatttctccccgagatggcgggtctgacggcggcggccccgcggcccggagtcctcctgctcctgctgtccatcctccacccctctcggcctggaggggtccctggggccattcctggtggagttcctggaggagtcttttatccaggggctggtctcggagcccttggaggaggagcgctggggcctggaggcaaacctcttaagccagttcccggagggcttgcgggtgctggccttggggcagggctcggcgccttccccgcagttacctttccgggggctctggtgcctggtggagtggctgacgctgctgcagcctataaagctgctaaggctggcgctgggcttggtggtgtcccaggagttggtggcttaggagtgtctgcaggtgcggtggttcctcagcctggagccggagtgaagcctgggaaagtgccgggtgtggggctgccaggtgtatacccaggtggcgtgctcccaggagctcggttccccggtgtgggggtgctccctggagttcccactggagcaggagttaagcccaaggctccaggtgtaggtggagcttttgctggaatcccaggagttggaccctttgggggaccgcaacctggagtcccactggggtatcccatcaaggcccccaagctgcctggtggctatggactgccctacaccacagggaaactgccctatggctatgggcccggaggagtggctggtgcagcgggcaaggctggttacccaacagggacaggggttggcccccaggcagcagcagcagcggcagctaaagcagcagcaaagttcggtgctggagcagccggagtcctccctggtgttggaggggctggtgttcctggcgtgcctggggcaattcctggaattggaggcatcgcaggcgttgggactccagctgcagctgcagctgcagcagcagccgctaaggcagccaagtatggagctgctgcaggcttagtgcctggtgggccaggctttggcccgggagtagttggtgtcccaggagctggcgttccaggtgttggtgtcccaggagctgggattccagttgtcccaggtgctgggatcccaggtgctgcggttccaggggttgtgtcaccagaagcagctgctaaggcagctgcaaaggcagccaaatacggggccaggcccggagtcggagttggaggcattcctacttacggggttggagctgggggctttcccggctttggtgtcggagtcggaggtatccctggagtcgcaggtgtccctagtgtcggaggtgttcccggagtcggaggtgtcccgggagttggcatttcccccgaagctcaggcagcagctgccgccaaggctgccaagtacggagtggggaccccagcagctgcagctgctaaagcagccgccaaagccgcccagtttgctcttctcaatcttgcagggttagttcctggtgtcggcgtggctcctggagttggcgtggctcctggtgtcggtgtggctcctggagttggcttggctcctggagttggcgtggctcctggagttggtgtggctcctggcgttggcgtggctcccggcattggccctggtggagttgcagctgcagcaaaatccgctgccaaggtggctgccaaagcccagctccgagctgcagctgggcttggtgctggcatccctggacttggagttggtgtcggcgtccctggacttggagttggtgctggtgttcctggacttggagttggtgctggtgttcctggcttcggggcagtacctggagccctggctgccgctaaagcagccaaatatggagcagcagtgcctggggtccttggagggctcggggctctcggtggagtaggcatcccaggcggtgtggtgggagccggacccgccgccgccgctgccgcagccaaagctgctgccaaagccgcccagtttggcctagtgggagccgctgggctcggaggactcggagtcggagggcttggagttccaggtgttgggggccttggaggtatacctccagctgcagccgctaaagcagctaaatacggtgctgctggccttggaggtgtcctagggggtgccgggcagttcccacttggaggagtggcagcaagacctggcttcggattgtctcccattttcccaggtggggcctgcctggggaaagcttgtggccggaagagaaaatga

SEQ ID NO: 3570 - DNA, 8447 bp, Homo sapiens
acctctgcctcctggttccaagcaatcctccttcctcaccctccagagtagctgggattacacgcgcctgccaccgcgcctggcctaatttttgtatttttagtagagatgggggtttccaaccatgttggccaggctggtctccaaactcctgacctcaggtgatcctgcccacctaagcctcccaaaatgctggtattacaggcatgagccaccgtgcccggcctaaataattaataaaataatggacgatgggtgccttctactgagctcccggtaattgtgagtgagtagaggacttgccctggggacattcagtgacctgctgggtgttgctgagctgtgaggaagttcaggtctggctgcagtggtgaggctgtgactcaatcaatcactgctgatgctcccaggacctgcaccagcttagtcctaggggcaaggattttaactgtccacctcagtttcttcatttgtaagatgcaaataacagtcacccctgcctcatgggatggagctgtgtaatgcccgcaacagtgcctgctgcatagaggggttgctgccagctgcctctccctccttgtctcttacctgcctgctgcctgggtcaggatgaagaggggcccttgtgttgcccccaccctggctgcctgctaagggcccatgtgatctgcctggcagaggagtttcttcaggaagaaccagggcagcttctgcccctagagggccaatgcccttggtgagtgcagtcccctggccccagcctggtccacctctgggaagagggtgcccagttgtgcaatccaggcccaggcagctgagccctcatctcagcatgcagggcggatactggagggggcttgtggcatctgactctgtatctcctacctgcccctctccttggtagctgtgagaagtcactgctttggggagacctgatctggctgtgccagatggacactgagaaagaagtagaagactcagaattagaagaggtgagtgggctttggtggcgggctccctaccccactccctgccctgggctgcctgtgaccacactgcttgcctctgcaggcacactggacagacctgctggagacctgatcctcagtgtccttaccccctcctacctcttttctgtgccacctgctgtgggtccagcaggtttttacttgagtacaataaaaagtctgagtcaagggtgccttatggtggatgctgaggggaggggcggagctagtagcccaaggtcctgccagtcacggggcttcctcaggggcacagaggaggcaggaggggcccctggccctagcacgtgaacagcttctactctgcctggaaaccccatgcctcagctttcccctacttgcctctgagctcatgcaattcttggaagcctgggagacttaccttgaaattgaatgcaaataggacaaagaccaaggaggatggggggatgccctccttccacggggccctgtggcttccaagtcttaatctcctctagtctcttgtctacggagcctccttcaaacccagggaaagaaaagcacctgccagggttgtttttcttctaggatcttctattgatgctctgtgaggtcccccaggagccatgaagctagggctggctcctagggcaatgggactacagtgtccttgtcctttcttattctttctgttctttctttctttcttttttttttttttttttttttttgagacagagtctcactctgttgcccaggctggagtgcagtggtgtgatcttggctcactgaaacctccgcctcctgggttcaagtgattctcttgcctcagcctcctgagtagctaggattacaggtgcccgccatcatgcccagctaatttttgtatttttagtagagacagggtttcaccatgttggccagcttggtctcgaactcctgacctcaggtgatcctgctgcatcgacctcccaaagtactgggattacaggcgtgagccaccacgctcagcctctttcttgttctatatgtccatgctctgctccacttctgccccttcactctgccccacacatcactccagactggccttgtggtcagagcctggaatgcctgggctgctgggggcctgtggactgcactgggccagaacccctgccgccttcaagactggcctgtagccagcaggtaggtgacttttcccaggccggcctatcccacctttcccctccactcactcacctcccttgcctgggtcaattagagaaagcttgtcggccaggcatggtggctcatgcctgtaatctcagcactttgggaggccgaggcgggcggatcatctgagctcaggagtttgagaccagcctggccaacatggcaaaaccccgtctctactaaaaatacaaaaattaaccggatgtggtggtgtgcacctgtaatcccagctactcgggaggctgaggcagaagaatcgcttgaacccaggagggggaggttacagtgagcggagatcgtgctactgcattgcagcctgggcgagagagcgagtctccatctcacataaaaaaaagaaaaagaaagaaagcaagcttgtctgttggcctgccctgcagggtggagttcagagggaaggtcaggagcctagtgacagctcaaaaaaaaaaaaacccaaataccaatgttggccccttttgcctttcattcatgtgttttctatacactaaactcacatattgggtttgcagatcactccaagcttggctggagctgtggtggtaaggagggtaatagagaagcttccccaccctcaaccccaccccttccttcctggagttcccagccctgactttagatccctcccacactggaccttcaaaaccctcagggcagagagcagccctacactccctacaccacacccatactcagcccctgcaggcaaggagagaacaggtcaggttcccgagagctcaggtgagtgacacgttggaatggcccagggcaccttcaccctgctcagcttgtggctccaacattctagaagccgaggcctctgccatccctgccctttcccatggatattccatttcaattagacaacccagcctggccggaatccccctgcgttccttcttttcctttgtgtatttttgagacagggtgttgctccgtcacccaggctggagtgtagtgggatcctggcccactgcagcctcaaattcctaggctgaggcaatcctgccgcctcagcctcctgagtagctggggttacaagagcaagccaccacacccagctaattttgaaaaatattttttgtagaggagaggtcttgctttgttgtccaggttggtctcaaactccagggctcaagggatcctttcccgttggcctcccaaggctctgggattacaggcgggagtcaccctgcctgggcccctccttttgatgagtcatcagttttcattcccgcacgaggctctagcccctggtaccagcttagttgctcaatgggctgtgtttgttctggagcccagatggactgtggccaggcaagtggatcacagacctggccggcctgggaggtttccacatgtgaggggcatgaggggggctcaaggaggggagcatcggggagaggagcgcactgggtggaggctgggggtcccagcaggaaatggtgagacaaagggcgctggctggcagggagacagcacaggcaggccctagagcttcctcagcacagctggactctcctggagaccttcacacaccctgatatctgggccccgcgctacgagggtgctttcactggtctgcactatgccccaggccctgggattttgaacagctctgcaggtgactgaaaggtgcggccaggctggggaacgacctggtttcagccccagccccgccactgactgactttgtgagtgcgggcaagtcactcagcctccctaggcctcagtgacttccctgaaagcaaaaactctgcaaaggggcagctgggtgctggctcacacctgtaatcccagcactttgggaggctgaggtagacaaatcacttgaggccaggagttctagaccagcctggccaacatggtgaaaccccatctctactaaagaaaaaaaaaaattagctgagcatggttgtacatgcttgtaatcccagctacttgggatgccgaggcgggaggattgcttgaacccaagaggtggagtttgcagtgagctgagattgtgccacactgcactccagcttgggtgagagtgagactccatctcaaaaaaaaaaaaaaaaagagagaatcccactttcttgctgttgtgatggtggtaagggaacgggcctggctctggcccctgatgcaggaacatggagctgatccaggacacctcccgcccgccactggagtacgtgaagggggtcccgctcatcaagtactttgcagaggcactggggcccctgcagagcttccaagcccgacctgatgacctgctcatcaacacctaccccaagtctggtaagtgaggagggccacccaccctctcccaggcggcagtccccaccttggtcagcaaggtcgtgccctcagcctgctcacctcctatctccctccctctccaggcaccacctgggtgagccagatactggacatgatctaccagggcggcgacctagagaagtgtaaccgggctcccatctacgtacgggtgcccttccttgaggtcaatgatccaggggaaccctcaggtgcatggctgggtcctgggggtaagggaagtggaggaagacagggctggggcttcagctcaccagaccttccctgacccactactcagggctggagactctgaaagacacaccgcccccacggctcatcaagtcacacctgcccctggctctgctccctcagactctgttggatcagaaggtcaaggtgaggccggcctcaatggttcacacctgtcatcccagtttgagactgaggagggaggatcccttgaaggcgagagatggagaccagcctgggcaacattgctgtagagatgacatcccatctctacaaaaataaaattaacaacctggtatggtggcatagactgttcccagttacttaggaggctcagcggggaggactgtttatgcaaataggaagctgcaatgagccctgatgatcctgctgctgcactccagcctgggcaacacagcaaaaccatctctacgaaaaaaaaagttcccactgactggcaaggaaagccaggaaggggggctcaggtgccctctcagccatgtacctgttcttctggaagggcctcctcgcttctgccaggctcatcacatcttttttttttttgagacagagtcttgctctgtcaccctggctggagtgcagtggcatgatctcagctcactgcaacctccgcctccccagttcaagtgattctcctgcctcagcctcctgagtagctgggattacaggcgtgtgctaccacacccggctaatttttgtattctttttagtagagacggggtttcaccatgttggtcaagtggatctcaaactcttgaccttgtgatcctcctgcctcgacctcacaaagtgctggaattacaggcgtgagccaccgcgcctggccctttttttttttgagacagtttcactcttgttgccgaggctagagcgcaatcgtgtgatctcggttcactgcaaccaccgcctcctgggttcaagcaattctcctgcttcagcctcccaaggagctgggattacaggtacctgccaccacgcccggctaattttgtatttttagtagagatggggtttcaccatgttggtcaggctggtcttgaactcctgacctcaggtgatctggcaccttggcctcccaaagtgccgggattagaggcatgagccaccacgcccagccttcatcacatcttgagagaggacactgtctgcctcttgctctgatgagggtctgatgcaaaggatagtgagtctctacagtgcacacttaagaaaggcagcatgtgggtgctcacaggtcaggcggaggagggggagctggtggggaccaggcatgccttgctccagatcaggatatgatggcattggtgcagattatattagtatagaatatggtctcaggaaccaggcaggactttggcttccgagcagggttcagatcccagcttggccctacctgtgcagtgagatctcaagcaagtcagcctctaagcctcaggttcctcctttgccagttcaacagatgagctggcctggggtgggctgtgtggtgatggtgctggggctgggtcctctgcccctgcaggtggtctatgttgcccgaaacccaaaggacgtggcggtctcctactaccatttccaccgtatggaaaaggcgcaccctgagcctgggacctgggacagcttcctggaaaagttcatggctggagaaggtgggcttgactggaggaaggagggtgtgaagccgaggggtggtggctataacgtacagcaaccctgtgtcggtgccccctgcccgcttctctagtgtcctacgggtcctggtaccagcacgtgcaggagtggtgggagctgagccgcacccaccctgttctctacctcttctatgaagacatgaaggaggtgagaccgactgtgatgcttccccccatgtgacacctgggggcaggcacctcacagggacccaccaaggccacccagccccgtccctgggcggctcccacagcaagcccggattccccatcctacctccctggcccaggcccccccactgcagccccacctggcagcaggctcggcacagctttcatcttctgcacctgagtcagctgcatgggtggccacggatcagatacttagtcctattgcttatcctcaccaaagggtgtgccacccagggccacagtcatggaagaagaccatcccggtcctcacccataggcgccaagccctgttcatgatgggatcacagggcagagatcaattcattttactccagagactagggccccaggggttgaggctctttggggtttctaggggaagtggccagatcccctctgaggttagagagggggacccgttttgttttgctccactgaggagccctctgctgctcagaaccccaaaagggagattcaaaagatcctggagtttgtggggcgctccctgccagaggagaccatggacttcatggttcagcacacgtcgttcaaggagatgaagaagaaccctatgaccaactacaccaccgtcccccaggagctcatggaccacagcatctcccccttcatgaggaaaggtgggtgctggccagcacgggggtttggggcgggtgggagcagcagctgcagcctccccataggcacttggggcctcccctgggatgagactccagctttgctccctgccttcctcccccaggcatggctggggactggaagaccaccttcaccgtggcgcagaatgagcgcttcgatgcggactatgcggagaagatggcaggctgcagcctcagcttccgctctgagctgtgagaggggctcctggagtcactgcagagggagtgtgcgaatctaccctgaccaatgggctcaagaataaagtatgatttttgagtcaggcacagtggctcatgtctgcaatcccagcgatttgggaggttgagctggtaggatcacaataggccacgaatttgagaccagcctggtaaaatagtgagacctcatctctacaaagatgtaaaaaaattagccacatgtgctggcacttacctgtagtcccagctacttgggaagcagaggctggaggatcatttcagcccaggaggttgtggatacagtgagttatgacatgcccattcactacagcctggatgacaagcaagaccctccctccaaagaaaataaagctcaattaaaataaaatatgatttgtgttcatgtagagcctgtattggaaaggaagagaaactctgagctgaaagagtgaatgcccggtggggccacatatggtcacctctcccccagccttcagctccccaggtcaccatatctggggaggggagaagggtttggagaagtaaaacccaggagatgtgtggaggggggatgtctgtttaatcccagcacatcctctgctgtcctgccccaagatggtggaggacgtcgagtccgccgggcagcgtcactttttcttgggctccttagaagctaccaggtacctctgggccacactgagatgaggggagtagccgcctgcataggaggtgtcttcaaacaggatagtatagtccctcctgggggttgtgggggtaggtggccaaggaagggtagaggagcaagcccccggggctggttgtcaactcactttgttggctggaattggttgtaacttgaccacctcgggcaggatcccactgctcatccccaa

SEQ ID NO: 3571 - DNA, 4003 bp, Homo sapiens; identical to SEQ ID NO: 1013

SEQ ID NO: 3572 - DNA, 412 bp, Homo sapiens; identical to SEQ ID NO: 3030
  misc_feature (1)..(412): n=a,t,g or c

SEQ ID NO: 3573 - DNA, 360 bp, Homo sapiens
  misc_feature (1)..(360): n=a,t,g or c
cttggaggagctctgttggtgagaggtcgccctgcctcactggcacccctgggggcactagctggaagagaggcctggccatgctcctctcagggcaggcacatgtacggggcatacaaggcacagcgcctgttggaacaggtggctgtgttcctgctcctggcccccgtgcggctgggcctccgcccctgcaccagtcacatgcactggacgagggccgaaactcctgtctgctatcgagccctggtgctatgtggccccggagccacagcacaaatcatcttnagtggcgaacnnaaccnactttgattctattttttttttaacacattaaaatctgtttttaaagataaaaaaana

SEQ ID NO: 3574 - DNA, 397 bp, Homo sapiens
  misc_feature (1)..(397): n=a,t,g or c
tttgcagtgagctgacgtgacaccactgcactccagcctgggtgacagagcaagactccatctcaaaaaacaaaaacaaaaaaaacagatagagggaggatggtcatgtctgtgtcatttccaaggtcttactgctttggggttcattttcacctcatttagttcgtgcgagacagcgatgatttttgctgttttatgaaggaggagtttgtggcttgagttgctgggagttggccagtgtggcgagctcttgtggccatgccagccggngcaaggagttgagccctcgaccacccgctgcccggtccccactctgggtccagggacagcactgaaatccacacctttgacctgtgtcactggaagcacctgtcccagatacattcactttgacttg

SEQ ID NO: 3575 - DNA, 472 bp, Homo sapiens
gacgcgcggggccacactgccgccccctagactggcgctgggactgtgggacaagttggctgggtccgggcttggggactgcaaccggtcttctgtgcttcaccatctacataatgaatcccagtatgaagcagaaacaagaagaaatcaaagagaatataaagaatagttctgtcccaagaagaactctgaagatgattcagccttctgcatctggatctcttgttggaagagaaaatgagctgtccgcaggcttgtccaaaaggaaacatcggaatgaccacttaacatctacaacttccagccctggggttattgtcccagaatctagtgaaaataaaaatcttggaggagtcacccaggagtcatttgatcttatgattaaagaaaatccatcctctcagtattggaaggaagtggcagaaaaacggagaaaggcgctgtatgaagcacttaaggaaaatgagaaact

SEQ ID NO: 3576 - DNA, 142 bp, Homo sapiens; identical to SEQ ID NO: 373

SEQ ID NO: 3577 - DNA, 503 bp, Homo sapiens
aattcggcactaggtgagtcatcgagaagtcctggatcttttgtggttacaccagcatcatgtggcaagcagaggcgacttccggaagagacaggcaggcaccgtgagacaggtggctgtgctctcccaggtgtctcagagacagatgccttatttaaaatcagcacgacatgtgtgagatcttctgtttcctaccccaaatcctgaaaccctgcagacactggctgactggtagaggtggggtctgtaagttgtcccctagtttgctaagaaaatctaaaataatatttattatatgagttaggagagagagaatgggtccgcgtggcctcctctgcagatgtactggtctgaaatgaggttctgagtcactggccaggccagatgtgctcatgtcggtgtctggtgtctggtttgtggagaaaacagtatggtgtgttttaagctatttgtgttctgttgtaatatacttttagaaggttaattggtaaggttaaggtagc

SEQ ID NO: 3578 - DNA, 316 bp, Homo sapiens; identical to SEQ ID NO: 3068
  misc_feature (1)..(316): n=a,t,g or c

SEQ ID NO: 3579 - DNA, 2036 bp, Homo sapiens
gccatggggcgctgggcctgggtccccagcccctggcccccaccggggctgggccccttcctcctcctcctcctgctgctgctgctgctgccacgggggttccagccccagcctggcgggaaccgtacggagtccccagaacctaatgccacagcgacccctgcgatccccactatcctggtgacctctgtgacctctgagaccccagcaacaagtgctccagaggcagagggaccccaaagtggggggctcccgcccccgcccagggcagttccctcgagcagtagcccccaggcccaagcactcaccgaggacgggaggccctgcaggttccccttccgctacgggggccgcatgctgcatgcctgcacttcggagggcagtgcacacaggaagtggtgtgccacaactcacaactacgaccgggacagggcctggggctactgtgtggaggccaccccgcctccagggggcccagctgccctggatccctgtgcctccggcccctgcctcaatggaggctcctgctccaatacccaggacccccagtcctatcactgcagctgcccccgggccttcaccggcaaggactgcggcacagagaaatgctttgatgagacccgctacgagtacctggaggggggcgaccgctgggcccgcgtgcgccagggccacgtggaacagtgcgagtgcttcgggggccggacctggtgcgaaggcacccgacatacagcttgtctgagcagcccttgcctgaacgggggcacctgccacctgatcgtggccaccgggaccaccgtgtgtgcctgcccaccaggcttcgctggacggctctgcaacatcgagcctgatgagcgctgcttcttggggaacggcactgggtaccgtggcgtggccagcacctcagcctcgggcctcagctgcctggcctggaactccgatctgctctaccaggagctgcacgtggactccgtgggcgccgcggccctgctgggcctgggcccccatgcctactgccggaatccggacaatgacgagaggccctggtgctacgtggtgaaggacagcgcgctctcctgggagtactgccgcctggaggcctgcgaatccctcaccagagtccaactgtcaccggatctcctggcgaccctgcctgagccagcctccccggggcgccaggcctgcggcaggaggcacaagaagaggacgttcctgcggccacgtatcatcggcggctcctcctcgctgcccggctcgcacccctggctggccgccatctacatcggggacagcttctgcgccgggagcctggtccacacctgctgggtggtgtcggccgcccactgcttctcccacagcccccccagggacagcgtctccgtggtgctgggccagcacttcttcaaccgcacgacggacgtgacgcagaccttcggcatcgagaagtacatcccgtacaccctgtactcggtgttcaaccccagcgaccacgacctcgtcctgatccggctgaagaagaaaggggaccgctgtgccacacgctcgcagttcgtgcagcccatctgcctgcccgagcccggcagcaccttccccgcaggacacaagtgccagattgcgggctggggccacttggatgagaacgtgagcggctactccagctccctgcgggaggccctggtccccctggtcgccgaccacaagtgcagcagccctgaggtctacggcgccgacatcagccccaacatgctctgtgccggctacttcgactgcaagtccgacgcctgccagggggactcaggggggcccctggcctgcgagaagaacggcgtggcttacctctacggcatcatcagctggggtgacggctgcgggcggctccacaagccgggggtctacacccgcgtggccaactatgtggactggatcaacgaccggatacggcctcccaggcggcttgtggctccctcctgaccctccagcgggacaccctggttcccaccattccctgccttgctgacaataaagatatttccaag

SEQ ID NO: 3580 - DNA, 493 bp, Homo sapiens
ctgaaaacgcaccatttgtatagatcatgaaaagttttaaggaaactcagagaaaaagagaacaacgcagcttaaaacttttaaaatgtcctccctcacccgtggctcaaacagccctgcatctgccgtggccggcacgtttctggttgaactgcctttatgttaaagttcagatactggtagtgtgcccatttcttaagctgtctatttttatttgttgagctggggtttggctggctccactccagatgtctctctcacaagatttggtgctgatgatctatttatagaactgtggttctgttgccatggtaacatgctggaggccagggcggctggggagctatttctggactcgtgctgtaatgtaagattgattgggcaagttagtatatcctctaagccagactaactctgtactagtaaaaaggagggggggacagaaaacttaggcagttctttgaataaacttttctctctttgatgattttct

SEQ ID NO: 3581 - DNA, 3301 bp, Homo sapiens
  misc_feature (1)..(3301): n=a,t,g or c
gaattctgcggagcctgcgggacggcggcgggttggcccgtaggcagccgggacagtgttgtacagtgttttgggcatgcacgtgatactcacacagtggcttctgctcaccaacagatgaagacagatgcaccaacgagggtctggaatggtctggagtggtctggaaagcagggtcagatacccctggaaaactgaagcccgtggagcaatgatctctacaggactgcttcaaggctgatgggaaccaccctgtagaggtccatctgcgttcagacccagacgatgccagagctatgactgggcctgcaggtgtggcgccgaggggagatcagccatggagcagccacaggaggaagcccctgaggtccgggaagaggaggagaaagaggaagtggcagaggcagaaggagccccagagctcaatgggggaccacagcatgcacttccttccagcagctacacagacctctcccggagctcctcgccaccctcactgctggaccaactgcagatgggctgtgacggggcctcatgcggcagcctcaacatggagtgccgggtgtgcggggacaaggcatcgggcttccactacggtgttcatgcatgtgaggggtgcaagggcttcttccgtcgtacgatccgcatgaagctggagtacgagaagtgtgagcgcagctgcaagattcagaagaagaaccgcaacaagtgccagtactgccgcttccagaagtgcctggcactgggcatgtcacacaacgctatccgttttggtcggatgccggaggctgagaagaggaagctggtggcagggctgactgcaaacgaggggagccagtacaacccacaggtggccgacctgaaggccttctccaagcacatctacaatgcctacctgaaaaacttcaacatgaccaaaaagaaggcccgcagcatcctcaccggcaaagccagccacacggcgccctttgtgatccacgacatcgagacattgtggcaggcagagaaggggctggtgtggaagcagttggtgaatggcctgcctccctacaaggagatcagcgtgcacgtcttctaccgctgccagtgcaccacagtggagaccgtgcgggagctcactgagttcgccaagagcatccccagcttcagcagcctcttcctcaacgaccaggttacccttctcaagtatggcgtgcacgaggccatcttcgccatgctggcctctatcgtcaacaaggacgggctgctggtagccaacggcagtggctttgtcacccgtgagttcctgcgcagcctccgcaaacccttcagtgatatcattgagcctaagtttgaatttgctgtcaagttcaacgccctggaacttgatgacagtgacctggccctattcattgcggccatcattctgtgtggagaccggccaggcctcatgaacgttccacgggtggaggctatccaggacaccatcctgcgtgccctcgaattccacctgcaggccaaccaccctgatgcccagtacctcttccccaagctgctgcagaagatggctgacctgcggcaactggtcaccgagcacgcccagatgatgcagcggatcaagaagaccgaaaccgagacctcgctgcaccctctgctccaggagatctacaaggacatgtactaacggcggcacccaggcctccctgcagactccaatggggccagcactggaggggcccacccacatgacttttccattgaccagctctcttcctgtctttgttgtctccctctttctcagttcctctttcttttctaattcctgttgctctgtttcttcctttctgtaggtttctctcttcccttctcccttctcccttgccctccctttctctctcctatccccacgtctgtcctcctttcttattctgtgagatgttttgtattatttcaccagcagcatagaacaggacctctgcttttgcacaccttttccccaggagcagaagagagtgggcctgccctctgccccatcattgcacctgcaggcttaggtcctcacttctgtctcctgtcttcagagcaaaagacttgagccatccaaagaaacactaagctctctgggcctgggttccagggaaggctaagcatggcctggactgactgcagccccctatagtcatggggtccctgctgcaaaggacagtggcagaccccggcagtagagccgagatgcctccccaagactgtcattgcccctccgatcgtgaggccacccactgacccaatgatcctctccagcagcacacctcagccccactgacacccagtgtccttccatcttcacactggtttgccaggccaatgttgctgatggcccctccagcacacacacataagcactgaaatcactttacctgcaggcaccatgcacctcccttccctccctgaggcaggtgagaacccagagagaggggcctgcaggtgagcaggcagggctgggccaggtctccggggaggcaggggtcctgcaggtcctggtgggtcagcccagcacctcgcccagtgggagcttcccgggataaactgagcctgttcattctgatgtccatttgtcccaatagctctactgccctccccttcccctttactcagcccagctggccacctagaagtctccctgcacagcctctagtgtccggggaccttgtgggaccagtcccacaccgctggtccctgccctcccctgctcccaggttgaggtgcgctcacctcagagcagggccaaagcacagctgggcatgccatgtctgagcggcgcagagccctccaggcctgcaggggcaaggggctggctggagtctcagagcacagaggtaggagaactggggttcaagcccaggcttcctgggtcctgcctggtcctccctcccaaggagccattctatgtgactctgggtggaagtgcccagcccctgcctgacggnnnnnnngatcactctctgctggcaggattcttcccgctccccacctacccagctgatgggggttggggtgcttctttcagccaaggctatgaagggacagctgctgggacccacctccccccttccccggccacatgccgcgtccctgcccccacccgggtctggtgctgaggatacagctcttctcagtgtctgaacaatctccaaaattgaaatgtatatttttgctaggagccccagcttcctgtgtttttaatataaatagtgtacacagactgacgaaactttaaataaatgggaattaaatatttaaaaaaaaaagcggccgcgaattc

SEQ ID NO: 3582 - DNA, 1262 bp, Homo sapiens
gcgtgccatagagatgttcatgaacaagaaccctcctgccaggcgcaccctggctgacatcatcatggagaagctgactgagaagcagacagaggttgagacagtcatgtcagaggtgtcgggcttccctatgccccagctggacccccgggtcctagaagtgtacaggggggtccgggaggtattatctaagtaccgcagtggaaaactgcccaaggcatttaagatcatccctgcactctccaactgggagcaaatcctctacgtcacagagccggaggcctggactgcagctgccatgtaccaggccaccaggatttttgcctctaacctgaaggaacgcatggcccagcgcttctacaaccttgtcctgctccctcgagtacgagatgacgttggtgaatacaaacgactcaacttccatctctacatggctctcaagaaggcccttttcaaacctggagcctggttcaaagggatcctgattccactgtgcgagtctggcacttgtaccctccgggaagccatcattgtgggtagcatcatcaccaagtgctccatccctgtgttgcactccagtgcggccatgctgaaaattgctgagatggaatacagcggtgccaacagcatcttcctgcgactgctgctggataagaagtatgcactgccttaccgggtgctggatgccctagtcttccacttcctggggttccggacagagaagcgtgaactgcctgtgctgtggcaccagtgcctcctgactttggtccagcgctacaaggccgacttggccacagaccagaaagaggccctcttagaactgctccggctgcagccccatccacagctatcgcccgaaatcaggcgtgagcttcagagtgcagcccccgcatgtggaagatgttcccatcaccgtggagtgaggaaaacagtcagcttgtcctggccaaaggggtttggaaggacaccaagaccccgttggtgactgaagatgacactgagctttaatggctgaagacccagatcagggcagtgaccagatcacagggacatctgtggctcccagtccaggacaggaaggactgagggtctggctggttccctcttccattctaggcccttatccctgtttagttctgagagccaacttgagataccatatgctagcattcccagtccccagctggggcttggtgtgagtactttttctatggctattgtgtcaggtcactgtggataaaggcaaagacagatatttattg

SEQ ID NO: 3583 - DNA, 3716 bp, Homo sapiens
aagcttgggagcactggggaagagaggcatggctcggggaggtcgcagtgaggactggagtggggaggagggggagatggaggaggaggcttgggaggggcagggggaacttaggcaggaaaggagcttgtagtagcgggggagtgaaaagagagatggagaaagaggggatgggaagaaagagggagaaagggagtcaggggtggggcatggaggtgggtggggctgggctgccaaagcaggataaatgcacagctgcctgctggtctgggctccctgcctcaggctctcaccctcctctcctgcagctccagctttgtgctctgcctctgaggagaccatggcccagcatctgagtaccctgctgctcctgctggccaccctagctgtggccctggcctggagccccaaggaggaggataggataatcccgggtggcatctataacgcagacctcaatgatgagtgggtacagcgtgcccttcacttcgccatcagcgagtataacaaggccaccaaagatgactactacagacgtccgctgcgggtactaagagccaggcaacaggtaggtgctccctccaccccaggggtcctgggtcccagcctggtttgttccccaacccccaagagcattcccagcaaatcaacactgatacattcatgatctaatgctcagattcattcagctttccctggctctccgctgatgcccttcatgcctaagcacgctccccggccgtgcacaaactcagcttcctttaacctgcagcagccactgtgtctgtaccatgactgtggcatttcccagggtccagcaggtgtggatggagactgtgcttactctgggtgggcttgatgctgctcaggatgagatccaggccatgaggttcatactcctccctgagtcctctctgcaggggccacacaggaacctggctcactgttctgcagagccctgcttccccaagtcacgcccctgggcacagccccttatggctagcggccttcaccctcaggcccggctgacaaactcccacagcctagggcgctgagtccctgctggggtggagcatgcctgaccctgcctctaccagctgatgcagttagacctcagccagatgaggacagtggtcacccagcagagcagaggaggggtcaggtcgggagggagcttcagcagggcaactgggcccagcttgacctgcatcccatggcacagcagcaaatagtgacacagtctttagagctcctccaccttctcctgaaattcaaaggaatccccaccagccccgtttctcctcttgcagctgtcagctggggctctctccctgcatacgagatacactccctggtgccgtggtccccgctggcctgcatctccctttcaagcatgacagtaacttggagtgaagcacagggcattgcagaccatcaggcccagaagcctattttagacatgggtaaactgacactcgagggatctcagcagttcctcctggttccaaagagtccctcatcccaggtttctccacagctctgccacattgtgtctgggaaaggccctatgcagggaaagggttcaattctaatctgcaactgtaagacacgcaggtgtgctgctgacttgagaaatgtatcttgaatctcacacttgaaatggtggcatccggacggccccattgatccaaaatatctgtgtgtgtgaagcatctcatttcctactctgagtgaagtaataaatctatgttaaatggagggaataagattttcagaagttaggtgaaattttgtcatcagacagaacttcctagaaaagagtcagtgttccctcgcccctgagccacagacagcagaattcaatgaatccttttacccagcacagagaaagcaatgtttaagagcgggtatgaggctcagcaccctgccagttgacaggaagagggggcttgtgtgccttgtgttgacatgtgggcagctcacgaagcccccaagcaagtccagtgactcagccacagtgaagtgcctgtgagtgcatgaactgatgggggcgctgtcctgttttctcctgtgtgcagaccgttgggggggtgaattacttcttcgacgtagaggtgggccgaaccatatgtaccaagtcccagcccaacttggacacctgtgccttccatgaacagccagaactgcagaaggtacgttcctgatgcaggtcccgggccagtcatgcactgcagaggggtgcgtatgtgtcagcctctgccctacacatgtttggagggtgtgtgtgtgtgcaggtgggtatgtggggagtcatgtatgcatggatgtgtacatgttcatgtacttgtggaggggtgtgcctgtaggtgtgcatgtggaaaggtacacgtgtgtacacacctgtgccagtgtgtgcagggaggtggatgggagcatgtgtgcctgtgcatggatgtgtggggggtgtatggggctttgtacatagatccatggggatgaggggtccaagtgagtttacgtagttgtccatgtatgtgcagatggggtggtgagggaggagggtgatgtgtttgttttgctaggaaggctttaggttgggaatggttactataaggtcaattctgcctgctttggagtgttgcctgttggacaggaagaagcagctgtgcggctgtgtgctgggcagggagaaggggctctgtctaatcccaggctcaggcacctgcatgcagccacagccacagtgatcagattagtgggacctagaggcctgttagctgggaagccctggacctgcccggctcacccaacaccagcctctccaaggacctgctggttcttgtgaggtctccactcggggaagagcctgagcactccccttgttgcccttgccccataccccagctctttgagggggagttgccctgccctggttcttccctctggcccctcttagtgctggcctggtgctggaagtggaaggagctgggggaactgagccgcctccccatgccctgcacccttggggctcccgaggcctgcccaggctactcctcacagggctgtgctgggacaggacactgcaggctggggtggggtcccaatgccacctggtgacttggagccttgggaggggcaatggaacagtcactattcattctagttcagcactctgggactcagtaggggtgggtgagggcccagtgtctcacctccatcctcctcacccaggctctgacatctcatgcctgggcatcttcccctttaactgtaacccacactgattggccctctctcttccctttcacagaaacagttgtgctctttcgagatctacgaagttccctgggagaacagaaggtccctggtgaaatccaggtgtcaagaatcctagggatctgtgccaggccattcgcaccagccaccacccactcccaccccctgtagtgctcccacccctggactggtggcccccaccctgcgggaggcctccccatgtgcctgtgccaagagacagacagagaaggctgcaggagtcctttgttgctcagcagggcgctccgccctccctccttccttctcgcttctaatagcctaggtacacacacccccacctcccgcaattaaacagtagcatcgcctccctctgagttcttgagttcttggctgtctggggatgtgcacgcaggcagggtttctgcagttcctttatgaag

SEQ ID NO: 3584 - DNA, 451 bp, Homo sapiens; identical to SEQ ID NO: 3086

SEQ ID NO: 3585 - DNA, 214 bp, Homo sapiens
ttatgctacaggtttatttattatgaaacaaaggaatatgtattttatgtattttaccatgcataggttaactctttgccacagatttattggttcttgatacacctaaaataaaaaaaaatgtgtacctccaatagagagcaagcaagaatgattatgaagtaacaaatttaataaaggtattcttgttattaaaaaaaaaaaaaaaaaaaaa

SEQ ID NO: 3586 - DNA, 411 bp, Homo sapiens
aaagttcggagcaggacggcttacctgttttctagatttgtcaaatctctcaataagcaaatgaatcctttcattgaggatattttgaatagaatacaagatttattagagctttctccacctgagaatggccaccagtccttactgagcagcgatgatcaactttttatttatgagacagctggagtgctgattgttaatagtgaatatccggcagaaaggaaacaagccttaatgaggaatctgttgactccactaatggagaagtttaaaattctgttagaaaagttgatggctggcacaagatgaagaaaggcaagcctctctaggcagactgtcttaaccatgctgttggatttggcaagtcgaaccagtaaagcttttcagccaacagacagactgtggaaacaa

SEQ ID NO: 3587 - DNA, 2283 bp, Homo sapiens
ctcgcggccccaggggccatggcgaagaagagcgctgaaaacggtatctatagcgtgtctggagacgagaagaagggtcctctcatcgtgtccgggcccgatggtgccccgtccaagggcgatggccctgcgggcctgggggcgcccagcagccgccttgctgtgccgccgcgagagacttggacacgccagatggacttcatcatgtcgtgcgtgggcttcgccgtgggcctcggtaacgtgtggcgcttcccctacctgtgctacaagaacggcggaggtgtgttccttattccctatgtcctgattgccctggttggaggaatccccattttcttcctggaaatctcactgggccagttcatgaaggccggcagcatcaatgtctggaacatctgtcccctattcaaaggtctgggctatgcctccatggtgattgtcttctactgcaacacttactacatcatggtgctggcctggggcttctattacctggtcaagtcctttactaccactttgccatgggctacgtgtggccacacctggaacactcctgactgtgtagagatctttcgacatgaagactgtgccaatgacagcttggccaacctcacatgtgaccagcttgctgaccggcggtcccctgtcatcgagttctgggagaacaaagtcttgaggctctccacagggctggaggttccaggagccctcaactgggaggtgaccctgtgtctgctggcctgctgggtgctggtctacttctgtgtctggaagggggtcaaatccacgggaaagatcgtgtacttcactgctacattcccctacgtggtcctggtcgtgctgctggtgcgtggagtgctgctgcctggcgccctggatggcatcatttactatctcaagcctgactggtcaaagctggggtcccctcaggtgtggatagatgcggggacccagattttcttctcttatgccatcggcctgggggccctcacagccctgggcagctacaatcgcttcaacaacaactgctacaaggatgccatcatcctggcactcatcaacagcgggaccagcttctttgctggctttgtggtcttctccatcctgggcttcatggccacagagcagggtgtgcatatctccaaggtggcagaatcagggcctggtctagccttcattgcctacccacgggctgtcacactgatgcctgtggccccactctgggctgccttgttcttcttcatgctgctgctgctcggtctggacagccagtttgtaggtgtggagggcttcatcactgggctcctggatctcctcccggcctcctactacttccgttttcaaagggagatctccgtggccctctgttgtgccctctgctttgtcatcgatctctccatggtgactgatggcgggatgtacgtcttccagctgtttgactactactcagctagtggcactaccctgctctggcaggccttttgggagtgcgtggtggtggcctgggtgtacggagctgaccgcttcatggacgacattgcctgtatgatcgggtaccgaccttgcccctggatgaaatggtgctggtccttcttcaccccgctggtctgcatgggcatcttcatcttcaacgttgtgtactacgagccgctggtctacaacaacacctacgtgtacccgtggtggggtgaggccatgggctgggccttcgccctgtcctccatgctgtgcgtgccgctgcacctcctgggctgcctcctcagggccaagggcaccatggctgagcgctggcagcacctgacccagcccatctggggcctccaccacttggagtaccgagctcaggacgcagatgtcaggggcctgaccaccctgaccccagtgtccgagagcagcaaggtcgtcgtggtggagagtgtcatgtgacaactcagctcacatcaccagctcacctctggtagccatagcagcccctgcttcagccccaccgcacccctccagggggcctgcctttccctgacacttttggggtctgcctgggggaggaggggagaaagcaccatgagtgctcactaaaacaactttttccatttttaataaaacgccaaaaatatcacaacccaccaaaaatagatgcctctccccctccagccctagccgagctggtctcgatatcaagcttatcgataccgtcgacctcggaggggggggccggtacccaattcgccctatagtgagtcggttttacaaattcaattggccgtcggttttacaacggtcggt

SEQ ID NO: 3588 - DNA, 354 bp, Homo sapiens
  misc_feature (1)..(354): n=a,t,g or c
tcctgccaaaaagcaggggggcaggcctaagccgtcctaggtcagctccatgtgccatgcacgccatgcaccctgttccctgacaagtttcaacaattgtaaatatttcttccttgaagaggagagcttgggtgggggttgggtgggagggacttgggtctttggtgctaggagagggcctgtgctccacacagccgtggttttctgattttcaccatgcccggggcctcccttcccacctgcctgtgagaattgggaggttagtgcctgaagctcagagctacacatttttaattagtttttacatttttnggataaaggttgaaataaagtggtgtggaatttttaaaaaaa

SEQ ID NO: 3589 - DNA, 498 bp, Homo sapiens
ttaaagcaaagaattccccggtcccagccatgtccaacgtcccccacaagtcctcgctgcccgagggcatccgccctggcacggtgctgagaattcgcggcttggttcctcccaatgccagcaggttccatgtaaacctgctgtgcggggaggagcagggctccgatgccgccctgcatttcaacccccggctggacacgtcggaggtggtcttcaacagcaaggagcaaggctcctggggccgcgaggagcgcgggccgggcgttcctttccagcgcgggcagcccttcgaggtgctcatcatcgcgtcagacgacggcttcaaggccgtggttggggacgcccagtaccaccacttccgccaccgcctgccgctggcgcgcgtgcgcctggtggaggtgggcggggacgtgcagctggactccgtgaggatcttctgagcagaagcccaggcggcccggggccttggctggcaaataaagcgttagcccgcagcgc

SEQ ID NO: 3590 - DNA, 1042 bp, Homo sapiens; identical to SEQ ID NO: 500

SEQ ID NO: 3591 - DNA, 2066 bp, Homo sapiens; identical to SEQ ID NO: 503

SEQ ID NO: 3592 - DNA, 625 bp, Homo sapiens; identical to SEQ ID NO: 3107
  misc_feature (1)..(625): n=a,t,g or c

SEQ ID NO: 3593 - DNA, 574 bp, Homo sapiens
  misc_feature (1)..(574): n=a,t,g or c
gatgangacagggtcgtgcccagatgatggagaaatcgacccagaagcctgaggaggtgtcctgggtttggctggctggctcctgctccagcggcccggcttcaggtgtccgggggcgtggctgcctggagcaggtgtgctgaataccctggatgggaactgagcgaacccgggcctccgctcagagagacgtggcaggaccagcgaggaatccagcctgtccacttccagaacagtgtttcccangccccgctnagtggaccggacctctgacacctccaaggttcttgctgactccggcctggtgaaagggaagcgccatggtcctggctgttggggtcccagggaagaaggctctcttctnggacaaacacaccctcccagcccccagggctgttgcaaacacattgccccttgccataaagcaccaaacaaagaacttctttgcagggtggagtgggctgttttttaataaagtttgttttacagattacggaaacagttcaaaatgggatttataatttctttttttgcattaataaataaagatcctctgttaacaaaaaaaaaaaaa

SEQ ID NO: 3594 - DNA, 1707 bp, Homo sapiens; identical to SEQ ID NO: 3115

SEQ ID NO: 3595 - DNA, 3273 bp, Homo sapiens
gaattcggcacgagcgagtcgcgacgtcgtcggcaagcggccgccttccacgtaacgcgcgccggcgggggagggcgttggcgcggagccgacgggaacgtccgcgctgcggagcagggcagggaagccgggaggcgggcccggcccgagcttgtccttgtcgcgcaggtactccgagcactatgtcgtccccggcgtcgaccccgagccgccgcggcagccggcgtggaagggccacccccgcccagacgcctcggagtgaggatgccaggtcatctccctctcagagacgtagaggcgaggattccacctccacgggggagttgcagccgatgccaacctcgcctggagtggacctgcagagcactgctgcgcaggacgtgctgttttccagccctccccaaatgcattcttcagctatccctcttgactttgatgttagttcaccactgacatacggcactcccagctctcgggtagagggaaccccaagaagtggtgttaggggcacacctgtgagacagaggcctgacctgggctctgcacagaagggcctgcaagtggatctgcagtctgacggggcagcagcagaagatatagtggcaagtgagcagtctctaggccaaaaacttgtgatctggggaacagatgtaaatgtggcagcatgcaaagaaaactttcagagatttcttcagcgttttattgaccctctggctaaagaagaagaaaatgttggcatagatattactgaacctctatacatgcaacgacttggggagattaatgttattggtgagcaatttttaaatgtgaactgtgaacacatcaaatcatttgacaaaaatttgtacagacaactcatctcttacccacaggaagttattccaacttttgacatggctgtcaatgaaatcttctttgaccgttaccctgactcaatcttagaacatcagattcaagtaagaccattcaacgcattgaagactaagaatatgagaaacctgaatccagaagacattgaccagctcatcaccatcagcggcatggtgatcaggacatcccagctgattcccgagatgcaggaggccttcttccagtgccaagtgtgtgcccacacgacccgggtggagatggaccgcggccgcattgcagagcccagtgtgtgcgggcgctgccacaccacccacagcatggcactcatccacaaccgctccctcttctctgacaagcagatgatcaagcttcaggagtctccggaagacatgcctgcagggcagacaccacacacagttatcctgtttgctcacaatgatctcgttgacaaggtccagcctggggacagagtgaatgttacaggcatctatcgagctgtgcctattcgagtcaatccaagagtgagtaatgtgaagtctgtctacaaaacccacattgatgtcattcattatcggaaaacggatgcaaaacgtctgcatggccttgatgaagaagcagaacagaaacttttttcagagaaacgtgtggaattgcttaaggaactttccaggaaaccagacatttatgagaggcttgcttcagccttggctccaagcatttatgaacatgaagatataaagaagggaattttgcttcagctctttggcgggacaaggaaggattttagtcacactggaaggggcaaatttcgggctgagatcaacatcttgctgtgtggcgaccctggtaccagcaagtcccagctgctgcagtacgtgtacaacctcgtccccaggggccagtacacgtctgggaagggctccagtgcagttggcctcactgcgtacgtaatgaaagaccctgagacaaggcagctggtcctgcagacaggtgctcttgtcctgagtgacaacggcatctgctgtatcgatgagttcgacaagatgaatgaaagtacaagatcggtattgcatgaagtcatggaacagcagactctgtccattgcaaaggctgggatcatctgtcagctcaatgcgcgcacctctgtcctggcagcagcaaatcccattgagtctcagtggaatcctaaaaaaacaaccattgaaaacatccagctgcctcatactttattatcaaggtttgatttgatcttcctcatgctggaccctcaggacgaagcctatgacaggcgtctggctcaccacctggtcgcactgtactaccagagcgaggagcaggcagaggaggagctcctggacatggcggtgctaaaggactacattgcctacgcgcacagcaccatcatgccgcggctaagtgaggaagccagccaggctctcatcgaggcttatgtagacatgaggaagattggcagtagccggggaatggtttctgcataccctcgacagctagagtcattaatccgcttagcagaagcccatgctaaagtaagattgtctaacaaagttgaagccattgatgtggaagaggccaaacgcctccatcgggaagctctgaagcagtctgcaactgatccccggactggcatcgtggacatatctattcttactacggggatgagtgccacctctcgtaaacggaaagaagaattagctgaagcattgaaaaagcttattttatctaagggcaaaacaccagctctaaaataccagcaactttttgaagatattcggggacaatctgacatagcaattactaaagatatgtttgaagaagcactgcgtgccctggcagatgatgatttcctgacagtgactgggaagaccgtgcgcttgctctgaagccttgtgagcaaggaaggctccctgcatgtcatgcaattctgcacgccacatgggtgtggtcatgcaatcatcagttggccgccatcagtgtaaatagagcttaaagtcatggtttggctgcataaaaaattttctaacttgggttcaatatttgtagtgaagtatctgttttcatttttttcacgttataaataaaaatactatgctggccgggcgcggtggctcacacctgtaatcccagcactttgggaggccaatgtgggtggatcatgaggtcaggagttcaagaccagcctagccaagatggtgaaaccccgtctctagtaaagataacaaaaaattagctgggcttgatggcatgcgcctgtaatcccagctactcgggaggttgaggcaggagatcgcttaaacccaggcggcagaggttgcagtgagccaagatcgcgccactgcactccagcctcagcaatagagtgagactgtctcaaaaaaaaaa

SEQ ID NO: 3596 - DNA, 3273 bp, Homo sapiens; identical to SEQ ID NO: 3595

SEQ ID NO: 3597 - DNA, 485 bp, Homo sapiens
  misc_feature (1)..(485): n=a,t,g or c
ccatctattttcctntaataaacttcagcacggacacaaattcgcccaacatgtaaaagtgcaattccgaaaggatcctgctagaacaaggtccacggtacaaaagcatcctatggttatgtaactgcagcggccaccaagcgtccccctctgggctctggagggtttcggccctgcctgcctcccccctcctcctggggcagctgggacaggggacccctgtttgaagacagcggggacaacggcccgggaggcagctgaattgcccattgtgaggcccttcttccttggcactgcctgaaccccgtagcccactccggctgcccgggctcttctgccttctcctggcaccagcctccgggcccgggccagcttgctaggagagcgagaacactgtttctgaaaggggtgctgcttgcttctttgttcccggttttccgaaagcgngaatcccgaaacgccgtgagaaacctcaggctctggcg

SEQ ID NO: 3598 - DNA, 358 bp, Homo sapiens
  misc_feature (1)..(358): n=a,t,g or c
taatgttaaaaatcattttaaataaagttaccacattttcaataaaacttattcatccttccttgaaacagaaacacttggaattaaaacataatttgtaaaaaatcatgagccctgcgatgagtgggctgggagctggctccttccttctgtgcgtgttcgggaggcttcacgtcctcgcccgtggtccctgggtggcctgcagnaccagggggtggaaacaatgccagggagaattcctgtcacatcaaacaggaacattcactggattcctcttccagggaaaggagctgggggtggaagtgtggaaggacttgagtgttgtttcttttccaactccaggcagtgactccggctg

SEQ ID NO: 3599 - DNA, 429 bp, Homo sapiens; identical to SEQ ID NO: 3034

SEQ ID NO: 3600 - DNA, 287 bp, Homo sapiens
caaagtttaattcaattttattttccacttttagtatttttcaaattatacaacatgcagtctgccagagtacccatacatcttcattttagaacctagaagattaccaaaattttccgtgggccagaggagggtgacttccagatcttttgttacatggactatagtacagcatcgttattgatataaaccaccattctcccctcaaaccccccggacaagtttgtccacaatttttttaatgtgaaagctactgtacagatacttaaagcccggagaacacacat

SEQ ID NO: 3601 - DNA, 348 bp, Homo sapiens
gcaaaggaagccaattttattgaaatgcaatttcattgaaatcaaattcttaaacatttaaatctgtcacataatagatgtgcttctttattaacatattaaagattacaagacctagggggtggatctaattattaccataatttcagagtggtgctgtacataaatattttaagatatctgtaacgtggatatctgtgattcctagtgatgacagagacacaggtactaatactgctgtggtttgttgcctattttcctgatggaaataaataaaaacttcttttttccatcgaagttttcagatttcctgatttctatcctctggcccctttagattcacagatt

SEQ ID NO: 3602 - DNA, 283 bp, Homo sapiens
ttttcacattttcagacatcatcttgtttattacaaaacttaaaacaccttccaggcaagatccaaagcaattttattctaacattgttcaccttcatctgtagagtcaaatgtatctgccagcttgtgttgacaagggggaatgcttcccatttggtcaaggttgagggacagtaaaggaatcttgtattctaatgagtacagcatcctttcattgtccaagccatccaccttaggctttgaggttcaagtccaggtctggagaagagaaagtttcataccc

SEQ ID NO: 3603 - DNA, 324 bp, Homo sapiens
ggtctgatggcacatatttattgttctgtggtctaatcacagtgtttctaaatgtaaaaagtgcatatgttggtgtagctagtcccgcgacattgagctcctctgcatgaagacactgggctcctgcatccagctgtttttattgcaaactagctcctttctcccacactgggaactttagtccacgaggctgtcaccaccctggtagcactgggccaggctttgtagctcctgcagcagctctgctacgtcatcgtgctccactccagcatccatgaagctggcccagcgccgcaagtcgagtttggtgaggtctctggccaa

SEQ ID NO: 3604 - DNA, 404 bp, Homo sapiens
tttctttcaaactttgtttattcacctgtaaaaaacttcacacacacacacacacacacacagagagagagagagagagagagaggcagacctaagatccctgttccaatccccagactcacctagggggtcagcacatacattccataccaaggtgacccaaacccactatcagggtctgtgcctgggcacaaaggggcaggcaggggcagtgccatcgtttgaaactaggtctgtctggttgggggcctcctttgcaggtccatatgccttttcacagcctcacattagggatgttcacagcagagtggcctgttcggggtgggggactggctgtcgataggctggtagcgagccctagtagcatctcggcggcggcggaaggccaggaattcctcccgaag

SEQ ID NO: 3605 - DNA, 284 bp, Homo sapiens
ttttttaccttaagaaaaaccaatcgctttatttttcctcaatatatgtttagaaaactggtctgagaagaggtttcatgagatagaccagaggactatgtacaaaatcaagagttctaaaccaataagaaaaagggcacaatgaagcacacatccccaggggccacggcagcctaggaccttcctatcagtggggaggcaaggtctttgacggcttttgagttcagctgagggatcatgctgatcttcaggagtttgctgcttgcatacttattcttgatggc

SEQ ID NO: 3606 - DNA, 352 bp, Homo sapiens
gcgccgcagggagcaccacctcagcctcagcgctagtgaggacacaggccgtcctccggcggggagcacggtggggtcagggtgctgtgtggtcccgcaaagaggcagctgagcttgggcctcaggtcgttccacaccttgctcatctccttgtgcccttggatctgagagttgacgaaggcgcggaggatgtgggaggtgaggggcaggtagacgtggatgagctgcgtctcctggtgcaggcagtacagggagaagtagttccgcagctccatcgtctgaatcgcgttctcctccacgatgcgggactccagctgctccacggactccggctcgcggttctgcgcggtgg

SEQ ID NO: 3607 - DNA, 413 bp, Homo sapiens; identical to SEQ ID NO: 3065
  misc_feature (1)..(413): n=a,t,g or c

SEQ ID NO: 3608 - DNA, 323 bp, Homo sapiens
gtagagagcagagatgataattttattgaattttgcccccaagactcacaatgcaatacagattcatattcagtaaacacttattgggaatctacactatcaggaatgctttttaaccacaagtaatggaatacacaaataatagtggcttaaagacattagttatatcacatgacaaaaaggctagagatcattgtttttgtgttaacttgttgcattgctatcatataactgctttcacttcaagcactgtgcagagcctcccagaggacctccgtgtgtgctcctttggttcttcctaggttccatagccagccttagct

SEQ ID NO: 3609 - DNA, 327 bp, Homo sapiens
  misc_feature (1)..(327): n=a,t,g or c
caacatctaaatagactttnatttttattttacttgtttggacagaaaagaaaattcatcagctttcattagagtctccttaagtnttggaaacaanttaaactcagaaatagtggaccttgtagaaaagcatcacaaattaaaaatatatttctccatgtggtaaaagtgctttcaatcccattaaagggcacagcaagggtgtttggaaacacgatctgaaatttggcctgcaatccgtggcatcgattccaaccacagggcgggggagtcaccatgatctagagcacaggagccacgtggggcccggagcatgcggacagcaac

SEQ ID NO: 3610 - DNA, 309 bp, Homo sapiens
  misc_feature (1)..(309): n=a,t,g or c
tgatagcacattttagtttttaataaaatctgctttttacttatatttaaataaattgcccagttactgaatcagaagcatttcttacaaagcaaacaaaataagcatcccttctatgttaataacatgttaatagtatgttggcaagttgatttagaacaacttgccaacaatacaaacagaaaaaaggagtgggtcaaagaaatctagtttggctttattttcaatagatcatactgtctgttgaaaaaggaataaataattatggagcctatctaataatatactcaatagnttgaaattattgag

SEQ ID NO: 3611 - DNA, 243 bp, Homo sapiens
  misc_feature (1)..(243): n=a,t,g or c
caaaatacatgtttttatattttaccatatgttcacatttacaagangtctttataactctatatggctgtaagttactatttcctttcattcaacctgaattcctcccttcagcatttctttgagagaaaaaataggaaaattagtgattggaggtccctataaaattttcttacatctcaagtgttcctgaaatcaggtgtttgggctttatgaaattctgagtaactttttttttaacaa

SEQ ID NO: 3612 - DNA, 354 bp, Homo sapiens; identical to SEQ ID NO: 3087
  misc_feature (1)..(354): n=a,t,g or c

SEQ ID NO: 3613 - DNA, 580 bp, Homo sapiens
  misc_feature (1)..(580): n=a,t,g or c
tagggagaagtgccaacatatttgcagtttattttcaaatggttcagaggctgtctgtgtacatgagaagacaaagataaggcaaatgcagcaaaattgtaataattggtgaatccaggtgaagggactatggctggtctttgtacttttttttccaacttttctgtaggtttaaaattttcaaaataaaaaatgggaaatactttaaaaattgtaatcaaagacattagtacagaaactttcataatgtattttatttttacagtaaaattaatttatgtaaattgatagaattttactaatttcactcccaagttacattaaaaggcttacatatgtttgataatagcatatgtaaactagaactctgaatgatatccattggtcataatacgtactatgtagcggtaatggtgacntttgtgattgcacaagtcnagagatgccccaaatgacattgacctagacatcngggttattcnaaggctgaacngaagttgaatagaagggtttagtccaatacngagatgaaacngaggcagtccnggcgggggggagtgagtgtgtgtgnatatatncc

SEQ ID NO: 3614 - DNA, 466 bp, Homo sapiens
  misc_feature (1)..(466): n=a,t,g or c
caataatatttttattaaattccatggtggccttctctcaaaattagtaatgaaatgctgaaatgtccattgattagtgagggcaatgtatgtaagccagaagaatgcaataaataagggttatgtttcttcttgtcagacccagaagggagatctttgaacaacagtgcttcaaattgagaattcagtcccaggaagggtctctctgccccacagactgtggtggacaaacactgggtgtaacactttatcttcatccccaagccccagaaaattagaggcagagtctttctgacttgggtaccagtttaagtccttattaagcagcaaaaattaattccaaaatttggatgctgnccttgggaagaagcatacaggaaaatgaaaggggtaagagtaatacagcagcccatctgttggttcctaggtcctccatctaagaatcgttcctttggctgggcacagg

SEQ ID NO: 3615 - DNA, 498 bp, Homo sapiens
  misc_feature (1)..(498): n=a,t,g or c
gtagatatggggttccgccatatcgcccaggctggtcctaaactcctaggctccagtcatctgccagcctcagcctcccaaagtggtaggatcacaggcatgaaccatgatgaccagctggataaattgtttcaggaagggttgagatgatgttgaacatcatgccctccacatcaatttacggggaaaaaaattcatcttgtttctgccgattcaagagggactgacaagaggcaggaaacaataggccaacactgtgggtcattttcaactgggtttcaggctttacaaaatttctggacttgaaaaatttaaaggttgagggcaaggctttttccacttcaatggggctggtttaaaaaccctttttggcacccagattccaggcttnttaggggacaggaggcagaggtttttgggggntagggaaaggtttttngggacaagttacggtttccaaggttccncggagggcanttttttttcggagggantttt

SEQ ID NO: 3616 - DNA, 237 bp, Homo sapiens
  misc_feature (1)..(237): n=a,t,g or c
ttttttttttttttttttttttttttccngttggaaattttttatttaccactgcaaggtttttgctccaaagtgtcacaccagacatatgactacaatgtctcatgcatctttttgtgctttagttcatgactgcaaaacacacacttagcatttgacaacaggaaacacagagggcagaaacaaatcacaaggactagttggtttaggttacagccacattttccccggggctcc

SEQ ID NO: 3617 - DNA, 256 bp, Homo sapiens
tttttttttgcaaatcatcagcgctcatgtttatttataaagttacatcctaaaagtgattcgaacaataaatagttataaagaagatctgctgccctaccctctgggtgtgaggcctccatatggagtcagcagaggatctgggagggatcctgggaagctctgggatcctggggtctctgccgtctcagtgggcgcaacagaagccaggcaagcttcccacccttccttgcaggcaccagctgggcccccaggg

SEQ ID NO: 3618 - DNA, 392 bp, Homo sapiens
  misc_feature (1)..(392): n=a,t,g or c
acaaagagaaaattttattttcttattcttgaaatgactgtacgatttttcaatgttaaagttcactttcaagtatgatcaataacaagacatcaaatgtaaaaattatgctgtattatcattttctccattgcttcttaaaccactgaaagtaatttcacaattcaccacatttaggcatcttctttttcactttcttcattttttacttctttaggcaacaatggatcaatcttcagtaataaaccttcacttgttgaactacgaaggaaagcacgtaccacaangggacccaaattcaggcgggtctgtgcctacaaacttcattaataactgcttgcggattgggcagctatctgggtcacttgacatatccaatgttggctattttg

SEQ ID NO: 3619 - DNA, 216 bp, Homo sapiens; identical to SEQ ID NO: 3099

SEQ ID NO: 3620 - DNA, 538 bp, Homo sapiens
  misc_feature (1)..(538): n=a,t,g or c
tttttttttttttttaagagatggggtcttgctatgtgcccaggctggcctcaaactcctgggctctagtgatcctcctgtctcagcctcctgagtacctgggactacaggtgcacaccaccttgaccagtcacagtcctttttatataaaatttgggttttattttcgcagtattagcacccttacataggtcttgttatctgtgatttcatcaaatattatatttttctgaggccagggtttcagatatgctgattagtctttcaatcaagattaagaacaaatgcttcaattttcaattttgtttatattcttatagggcctctgagggttaaaactaatttattaaatgtgttattcattcccaaaaacttttaaaaatcccattttatttaattaatttatttgaggacataggctcactctgtcgcccnggggttgaggtgcaagggcncaatcgtggggctcaatgcaacctccgnctccngggggntcaaggcaattctggcctcaggctcccaagtaggtggggggcct

SEQ ID NO: 3621 - DNA, 552 bp, Homo sapiens
  misc_feature (1)..(552): n=a,t,g or c
ttttttttttttttttttttttttttttaggtaaactctttaatgaaagacatttattgtcagattataaaatcagtgttgatgataagccctcctacccacaaaacaaaaatcgtatgtatgaaattccctttcccgtaagttatgtgcctgtcagccatcccacttcagtccatctttggatgctgaggctctggttgccagtccttatctctacacctgtccctggtctagaggagaaacgaaggtgctctgaggcccctgtaacagagacccttgtcatccatatttgcaataaagacatcatggaggctgtgcaaaagtatccttctccccaacttctgcaggcaccatttccatctcactacccagaggtacatcagagagcaggagccaggcaggtgacaaagatgtggaaggcttctaagtggttggctttgcgtctcagaagtgcgaagaaatgaaaatccatcaaacagaatgccattccatgtttcangctttacctcacctcnaatcnaatggctggtcttaattattgggccataagtg

SEQ ID NO: 3622 - DNA, 510 bp, Homo sapiens
  misc_feature (1)..(510): n=a,t,g or c
tgactttgccaaagatttaatatccacaaatgtacaatgctcactgggaaccaaagtcaggcatggggctgggctttaaggagcacaaacaaaaaggagggactagaaaacttcagaaaggtattggtgtgggatgttgtcggggggacaggggacagcgaggatgtgggatcccgagatcatccaaatccctatgtgtagacatatgtgtataaaggcctttaagagactcaggctgatggggtatcagatactcaagatgggtggtgccgggctctgaaagacatgcttcaagtaagagggactagaaaactccgccagggaagcaacagggatcagggattccaggaggatccaggggcctggggacttgttaaacacagattgttgggtctcactccctagagtttcntcttcaagtattctggggagcagccctgtgaatcataataccaagtcagggaggggtgtccaccatcaaatgttccagcntgcagtgggcccgggaag

SEQ ID NO: 3623 - DNA, 456 bp, Homo sapiens
ttgagatggagtctcgctctgccgcccgccgttctctcagctcactgcaacctctgccccccaggctcaagcgattctctcgcctcagcctcctgagtagctgggattacaggtgtgcaccaccaggcctggccagtccttccattcttagttcttgaggttatgcagtgtctttgccctgtgcttctcttgtattatgatccaaactcctttgtttaaaaaaaaaataaaacacctaaatataatccaaatgtgctaataaatgtgaaacagcctctttctctgaaacaagttcttcagtaaaataattctgtaatgtattgctttgcttttcttacatgaagttatgctattacaaaattaagtttcaattacaggcaaggttaaactctgcaagcaacccaaaactcaaaaagggctgaatgataagtcattcaggtaaagacaaaagaatgg

SEQ ID NO: 3624 - DNA, 415 bp, Homo sapiens
  misc_feature (1)..(415): n=a,t,g or c
ccaatagtttgactttattaaatcaatagaacgggatctcagtggttaagccgtcttaacagggccaggtctcttgaggtagtttttgggccatcagttaattacatcgactttccaggaaacagactatggagaatgagaggaatcagactgcctgtcacacacctctcatggaaccccctagtgacacctataaggacgttacagatctagttccagactttacagatctagttctattttctcaagttacagatggggaaactgacggccccagcaggggaacgcgggatgtatctaagtcactagtgagttggcggcagtcaggtctcttngattnttttccccatactctcagcccaacttctcagtggagaggggctggcagggctgcttctctggatagaatgtagcg

SEQ ID NO: 3625 - DNA, 265 bp, Homo sapiens; identical to SEQ ID NO: 2233

SEQ ID NO: 3626 - DNA, 400 bp, Homo sapiens
  misc_feature (1)..(400): n=a,t,g or c
cttcgccgcttctcgtttttctttgtgaacaggactgttttcaccattgtagaaaacatctactttctcttgtaggattttccgagctagctttctgttctgatcaactgatcttgtctgatggcactttacaacgatgcctgaggggatgtgcttcagacacgcagttgctggttttgttggttgcctggccccctggaccgtgtcctttcacaaactgctcttcgagttcattctcatccaaggaaagcagtgcacgggtagtccttcttgcctgccatctggaccggagtgacagctattcctggggataaacaacgttcaggctttctcccaaagccggagtccccatgggcgccgggnatattcgggtcaagtnggtgtaggaaaatgaaataaa

SEQ ID NO: 3627 - DNA, 265 bp, Homo sapiens
acactcaaaacctttattcattgatttacaaactgtacaatatttacaaagtttaggcattaatcccatattgacatgaatgctgtggagagtctaaaaataaatatgtggcacatagcttaatatacacatcatggctctttacacttaagccattaccaatagtgagatgtaatggagaatttaatgtggtagaaaagtcagagtggctgaccagtcccggaccttccatgtgaatgactcttccttggctccttgaggctgg

SEQ ID NO: 3628 - DNA, 118 bp, Homo sapiens; identical to SEQ ID NO: 3028

SEQ ID NO: 3629 - DNA, 234 bp, Homo sapiens
tttttggctggaaattagatgaccaagctcggaacggagcatcagggccctcgtttgtaagcttagttttcttttattcccaacaaattccatccttttatcactgggtattagcaagtcaggtcagaactattcattatttttggccaaagacattcccactaaagaagggacacagtgtggtaaaatacattctagagataagatgaggcagagtgcgagtgagtttgctga

SEQ ID NO: 3630 - DNA, 441 bp, Homo sapiens
  misc_feature (1)..(441): n=a,t,g or c
aaggacgaatatctcatttatttccctgcagctctcatcccctgctcatccaagcctccctccttccagatgaataggaacaggttacagctgacccagtttcactcccagcttcagaagatgaatcacggtgggttggcggacaaggaatggggcaagctggggcagcgcggaaggcagtgctgttttcaggaggcctgacctctgtggccagagtccccgtcagcaccgcttactgcaggccaagatgcctcccaccctccagaatccgaccgcggagggaagcttccagtccaggagcctgcggggaaatcctggcgggggctgagggctncagcccctnggcctnggcatttgggtgcctctttagggatctttncctggggtgccctaaagggttcaaccggttgttccgtnctggaaagggccgaaaaataaatt

SEQ ID NO: 3631 - DNA, 386 bp, Homo sapiens
gaggattatgattctggaaatttattaggtttttttttctccattaaggaagctacatgcaaaagatacaacatacagaatatctttaaataacacaactcccagacagggacaggacaatatttgggggggggcattctgtctttgctttgctatgttctatttttaatttttttgttcctctggatgaaatttctgagatgttactagatgggggatgtgggggtgctaggaggggtgggagaaaagcagaaagcagtacaaatacgagacttcaagcagattcttagagcgactgggaggtaaagacatggagagggtttggtggaggctctgggtgctacgacaaacacacgaacacttagccgaactttccaaaacgtcta

SEQ ID NO: 3632 - DNA, 462 bp, Homo sapiens; identical to SEQ ID NO: 3031
  misc_feature (1)..(462): n=a,t,g or c

SEQ ID NO: 3633 - DNA, 606 bp, Homo sapiens
  misc_feature (1)..(606): n=a,t,g or c
cattctttcatggacatctgttgcccatggtcaagtaaatttttaatgacacatagtcactacacacctttcagccttctggagaggtaagtgtacattgatctgtcctaattagccttgcagagtacttcagacatccctgcaggaacactattatttaataaaatagaagctgttttttcacaagctcagcacttgctccttggatagctgtattgtttttttgctcttctctccttttaaaactcatatcgcatgtctcatgttcgtctttgtctttgacaatgtagtattaatgcagctctttgtgtttctccaacaggctctccagccgctcaggtgccctctgccctggccccttgtttctttcagcctcatactgacgctgattgatatcttcgtgcagactcagttggagggcaactctaccagggaggtcatcagtttcatagcagccagggtgctagtgtgacagaaaggcgcagacttgtgagtctgagaagccagtgagcagggagatgaagttgtccatanggaagtcatcatggaggangagtactggcaccgacagaccatgtncccacaaactcacagaagctgccctgg

SEQ ID NO: 3634 - DNA, 487 bp, Homo sapiens
  misc_feature (1)..(487): n=a,t,g or c
aatgtataaatttgagcaatttattttagaacttttgaatctgaaaatcacctgcttgacattcatttgagaaagtgaaacataaaggagagtaacataagcaagacgacagaatgtgaggttctgcatccacatcccccacgacataatgcagctgccacagcaaacataagtgcattcatgaaagccttggaatccagttcagagtttgtggcacccagctggaggcaaagaccaaggaagacattttcagagggtgagcacttgaccaagtggcaagcttgccaattcacggttcccggcttcaaaacagaatactgccacattcttactgtagacttggctataactcatttgaccttggtcctgccactggnaacaatncttctttccttctccgcctggtncggaagaaattcatttcccgcttccggatgttccggcacctaactatgcgttccccaggacctacagatcgcgggcaaca

SEQ ID NO: 3635 - DNA, 563 bp, Homo sapiens
  misc_feature (1)..(563): n=a,t,g or c
aaccaatcaaataatttctttattgtgcttctacattttcccaataaaaacttgcacttgatgttttgtctctggaatactaacgctctttcagtcaggtgttccccaattcataaattgcttttcactcaaataaaccctttaaaattttgttgtgagtcagatgtttctttaacgcatggttgcaaaacgtgctgttagtaaggaacatgactgagatctacattcaggtcctagtgcagtttcttttgctgtcaccagggccatcttgctggcttgcacaggttatgtgataatgactgggcatcattcatgggaaactgcactgcgtaagggccctgggctaggcccaccagtaggccccgggcacattttcagctgcgacgaagggactagcaaccggtgangtagaaggagaaccaagagatgggtgggagaatgggaactgagctgagagagcttccggaaggttgcggtggcctaggngaatccacgtcattgagaaacggcgttagctgattttcacgggggcagatgacatggaagtgctgctgaaggaaaca

SEQ ID NO: 3636 - DNA, 465 bp, Homo sapiens
  misc_feature (1)..(465): n=a,t,g or c
actttctatagtagtttattcttcataaataaatcactattataactgactacttactgagaaatgaaaatattttaacttaaaaaaatacagagcccttgttgattaacagaatttgtcttaaataggattttatctatagtatcatatatataaaatccttatacaagtaaccattgaaacaagtcagtaacaaaatattcacataactgtatcacagatcttaggaaacagacattcagaaaagatttaaggccactaagtaacagcctctcataaaacccaacaaatcttaaaattgcnattagacttaaaagggacctaaataccacttcatgctgaaccaagattagaaaaatcttccactcttgacattttcatgttcttagtttttccaatcaagtgatcagctgtgataaacccatagggaattgactctataaanccaacttgggataaggangc

SEQ ID NO: 3637 - DNA, 275 bp, Homo sapiens
  misc_feature (1)..(275): n=a,t,g or c
ttttttttttttttatataaatatatagactgtgtgtatatattataaatgtatctatatatgtatatatgtacatgcacagctcagagcgtcctagcctgatacagggcctgcctggtgcctcctggagnctggccacctggggctgtcacttgaagtcaagagtcctggtgttagggatgtagagggattgggtctggcgactgcgtcgtggcgtagtgttgaggacgtccacgctcttgcggctggaacgcaccacgtctgccacaaagctg

SEQ ID NO: 3638 - DNA, 258 bp, Homo sapiens
  misc_feature (1)..(258): n=a,t,g or c
tttacactttactgagacaattttattcactatggatatatatacatgatcaacattttatcttcattcttcagaagacttaattagagtagctttcttctcatacttatctctaatctctttaatattttccgagagatcttctgacatgcattcntcatattctctatcaactttagcaatctgctcctcaagatgtttctctacagacccaacatgtgtagcaaccatctctaacagacgttgcaagttaatttc

SEQ ID NO: 3639 - DNA, 419 bp, Homo sapiens
  misc_feature (1)..(419): n=a,t,g or c
aactgaatgtgtctacttttattgtaggacaaaatcttgacatctgccccaaaatgacatctataacattgttcttaatttanttgcacacagattaggcagcactgtgacttattaaaatgagacactttctaccacaccaccataatgtgtcagccagctaacactttaatcagctcttcctggactttctggtgccatagcaacctatttgtagcaatgaattatctcctgaaattcaatactattggtnttatgcctttttagcagaagctgtacttttttgcaaagtcctgtggtataagttccccagatttaaatttccttggcaaatgggtttttcnaccatttggattttttttttaaagggtcaccaccaaaanaccttttcntcctanccatttnaaggaaaaaatggt

SEQ ID NO: 3640 - DNA, 476 bp, Homo sapiens; identical to SEQ ID NO: 358

SEQ ID NO: 3641 - DNA, 422 bp, Homo sapiens
ttttaacagtttctaaaacatttttattgtaaaaagttcaagaagccatttacaagccaaaaagtatcagaattaaataacacataatttttatagacacatttttctgtacaaagggctgatctttataggaattttaaataaataatctaaaaatcaatgtcactgattgcaaaataggtctctctctcgaccgtctcaaggtgacatgcattctatgcagccaaaagatgaggggtttgacatctgtgacgagcccgggcagtgagtctctggcgaagatttctcactttcttaataagattctgtcccgtggtgtcccattctactgctcttctatttaaagaaatctgtgttgagggatccatttcagaagagtcatttaattgtgaggttctaggcaaacagcttgagtcctgttc

SEQ ID NO: 3642 - DNA, 461 bp, Homo sapiens; identical to SEQ ID NO: 3042

SEQ ID NO: 3643 - DNA, 402 bp, Homo sapiens; identical to SEQ ID NO: 3044

SEQ ID NO: 3644 - DNA, 414 bp, Homo sapiens
caaagaactgattgcacagtatacagaaatcctgttatactttactacttaaggtggagtctaattttttttttttaatttatcagtgcttaaaaatcttcaaaatagcttagtgaggctcatgacagtgctggccccatggaaatgtagccttttgttgcgtttaaacactgtcacaccatctatgactgtcccattggtctgaagtgtagtggcaaactaagcatcctataagacaagctaaagcttgctttttgccagtcagttgaaagtcttgcatctcttcactgatgcactttctttaggtattgatagtcagaagcacaaagcatttattatgcattcaatcatgtagctaaacaaaaaactgaagtctcctgaagccatttaaaccagccgttccaaaatctcctg

SEQ ID NO: 3645 - DNA, 377 bp, Homo sapiens
aaacattaagattttattacaaaccatgcattatatatttctttacacttaaggaatagatatgaaacaatcttggagtaaaaattagaaggcaacttgcttcaagtttgtaccaagtcaatcaagcagaaacctgaagaaccttgttttaagatgagagtcatttatacttggcaggcattttcttccaatgaaaaaataaagtcaatgtgccattatcttgacacttataaaaatgtttataaaaagcatttaggccattgattctcacagttggctgaatattggaatcacctagattaaaaaaaatactaatccctatacaacatccccaaaattcagatttaattagtgtaagttaggccctgggcatatag

SEQ ID NO: 3646 - DNA, 204 bp, Homo sapiens
gtaccaggcaggggacctattttacaactggctttgaggagcttgccatctgaacagtctttagtagtatgataattacagagacacttcgtacaataatcaaatccacagccttctcgtttgcaggttgcccgttgtaaatagcaatcatattttgcaggtgaattacagcgaatacaggctttgaggctttcggtccttttc

SEQ ID NO: 3647 - DNA, 402 bp, Homo sapiens
cgttctcatattttataccattttctgtgtgtacagggtgtgcaaattaagcaatttcaataaatattagaaatttattttgcaaatataaaatgagtaaaatcagctaataacgcaatacaataaaatcatgtgctaaacagagctttttccccatgaacactttttaccctttcctttgaacatcctgacacttcctaaatacaatttatttcactgacttgtagaaataagcaaaagatgaaatattaactagctgcaagatactaaatactttagtaataagagcttggagctgtcaagttgtaataaattgaaaataacagaaaaagtgaaatacgctgcaaattaatgctcaaaaatgcagccatctgacttgcaaaatacacaatcctcccagcc

SEQ ID NO: 3648 - DNA, 477 bp, Homo sapiens
ttttatttcatcactataattttaatcattaggcatattaatgtcacatacagtttttaaaatataaatatttttaaagctgttttacaatatgataacaagaacacccagcagatacaggttgtacagttaatcattttgactgtgtcagtaatataatcagaatactgtaacggtaagagaaaaatactttttttttttttttgagactgggtctcgctctgtcgcccaagctggaatgcagtggcgcaatcacacctcactgcagcctcaacctcctgggctcaaggatcctctagcctcagcctcctgagtagctggaactacatgcatgcaccaccacactcagctaattttttttaaatttatttttagtagagacagggtctcactatgttgcctaggctagtcttgaactcctgggctcaagtgatcctcctgcctcagcctcccaaagtgctgcgattacaagcgtga

SEQ ID NO: 3649 - DNA, 427 bp, Homo sapiens; identical to SEQ ID NO: 3051

SEQ ID NO: 3650 - DNA, 374 bp, Homo sapiens
ttttagaaaaaaaatatttacacacacttttgcttttttaatatgaggtacacagtccaacaagaaaaaaaaagtaactgatatagtaaaggcactcagaaaaacaacagaaacaatatgaaaggtgttacaagagacagaaagagatgaaggatgatgattagtactcaccttcttcaaagctgcagtacggactttcctctttagggagagaagattagaaataaacaggttaaaattacattaagaaagggctactacatatatataatggggtaattatttatatagatctttaagaaaaggcaaattgagttctttaaacacatacgtgtgagaatgggacagatctgcattatctaacaggatggtta

SEQ ID NO: 3651 - DNA, 403 bp, Homo sapiens; identical to SEQ ID NO: 3057

SEQ ID NO: 3652 - DNA, 422 bp, Homo sapiens
ttcagcttcaatgaatttttaattttgttcaatcttgcatttgttcaaccaaaaacaatttaaagaggaacacgacaatcagccttagattgagcaagttcagctcctcactagggagttcttgaatccaccatgaaaatcaacagtgtgcatctaacagttttcttttaatttgagaactgaaaagtgaatcatcacatcaaatattcttcagggtctctttggtttccagattaaacatgtaatgtgacggtcatcttgccacattctcacatttccattttaaataatcataaataagaaaaccttactattctttggcataacacagctgattgattccgctgagtttcaaagtcttagaaattgcactcattccttctttagagtcctgcttcatggcaaaagttttcagctgaaag

SEQ ID NO: 3653 - DNA, 382 bp, Homo sapiens
ttttttttttggccttccaatattatgaggttattttgaggatccagggaggtaacggatgtgaagagcgtgtggtgaactgtaaataatgactatcacatttagttctcctacaatccagtgaggagtagtcacttgctcgaggtcacccagcgctggcaactgctggagctgggatttgaacccagctagcagtgtccatgctacaagagtggggccagccttggcacaggaggttgattgctgcagccagtgtttctagagttccagatatgaagtggtctcatgttctccttgggaggaggcccttggcttcccgaagtgctgggattacaggtgtgagccacagcactcagccaccagagcttttttcaaaccggag

SEQ ID NO: 3654 - DNA, 498 bp, Homo sapiens
tttatttcattaagatttaatagttttttttggactaagtagtggaaaaacttttatacttaactgagacattttgtcaaggctaaaaaaaagtcttgcaaaatggggcagtggactgacaggctgacatagaaaataaactttgcccaatcacaacttgtgcctcccatccctggagtactgactggcaccggtaagacagaatctctttgaatccattactccatgcccccttgaggcactgttgaagaaatctcacttttcagccagggtactggttctggtacatatggatcataagtccatttggggaagactcgtttatacaggttcatcagtactgtgtcttgagattttagcttcccatcaaagctgcatttcatgtggccatgggtacctaaaggttccttgatatgtcctctccggccccacttcgttctcagttccacggtttaaccacagcacatcctctctgttgaagaacatgtaacgtactac

SEQ ID NO: 3655 - DNA, 423 bp, Homo sapiens
tttttttttcatcttataaggaacatttatttggtaaactatctcatagaaatagactctaaaatcaaacagtttcttaaacaacagagagcataatcccaatctctccccatgaaaagcctacttcataactgaagtacctaaagcccatgaactgcattactagaagaaaggagggaaaaagacatttactaaacttccacaggaagactgtataaatctggaagtggttaagtacacatcagcctgtatccaagaatactactcagtctcaaaaattaactgaaaatctaaacttaatatggatacttctttgttcttggtaaggctcagaaaattaccatctatttaagtacgcatggtactagttacatgtcaactgatataataaaaaaggtgaagtggacaatcagtatttcaaac

SEQ ID NO: 3656 - DNA, 497 bp, Homo sapiens
ttttttaggctttctcttgtctttattctggggaggaggaatcctcctcatcatcttcctcatcttcatcattgaacgaacagggggtctcgcctcgggactcggagcagtgagaggccgcactgctggactggtgactgtttggggccaggaactgcccagttgctaaggccacttctgcatccaagcataacccttggtttacacttgactggggtaaggtggcaccagtggtcaggtctaaatttgaaactgattgggtagagttcagaagtagtccctgatttaaccaagaaggtcctgtggagatatctgtgatataaccttctaaagcctttgcaccagggatttcgcaagtttcagatcctccagagagcatttgcctgactccaggccaaacgacattcccatcgctttagtacttctatgtcatcatggatctcaaaggtgttgtcaaaattgaaaagatactcaaacttgtcactggagatgctgca

SEQ ID NO: 3657 - DNA, 407 bp, Homo sapiens
atcytatcmghcmcaamcggtttattycttttcgwcgggaaaaaattaaaccmmattcmaacggtgyttaacttacaggcagraaccaaagtagscatttawtgcgttagatatcggatacaagacatacacyggggagaatgcttcaccatctgamgmtcacaccacaayggcccagtggacagctgtgcactctgctcgtgcttamgygccycggystggcychggggacggcgtgtcygmagaacagaagaacagctgtgtttcacamgtactgacgcattttcgactgcayccggggggtatatattttyhcscygmcgggrcghggggaaatcagcaaagtccctcccacagagcattmggctgcctygcagagagccacggcagagamgcggacttctcct

SEQ ID NO: 3658 - DNA, 481 bp, Homo sapiens; identical to SEQ ID NO: 3075
  misc_feature (1)..(481): n=a,t,g or c

SEQ ID NO: 3659 - DNA, 415 bp, Homo sapiens; identical to SEQ ID NO: 3076
  misc_feature (1)..(415): n=a,t,g or c

SEQ ID NO: 3660 - DNA, 371 bp, Homo sapiens
  misc_feature (1)..(371): n=a,t,g or c
gnaaacatttattttcaaaaagattgaacactaagctatcaaattctgctctacagaaatgcatatgggataatcttattccttaccatcttgttacaaataaatnctaaacatttnctaaagatattcaaactgagttactacagacgagtgcctatcaagtgaagactctgtatagaggaagtcaggganttagggctgggcacggtgggctcatgactgtaatcccaggcgttttggggagggatcgcttgaggcccaaaaggtttcagaccggccggggggcaacacagtgagggccccatggcctctattaaaaaaaaaantaattcgggggnttcccccttacaatngggggccccggnaattac

SEQ ID NO: 3661 - DNA, 421 bp, Homo sapiens
  misc_feature (1)..(421): n=a,t,g or c
aagatatatgtatatatatatttnaaaatagtatgtttttattgcaaaatattcattagtgtcatcatatcatagccagatctacaaccccagagtaattcccatggttatgttacatggcaaaaaggactctgcattgtaattaagtttattaatcagctgactttagcattgggagattattctggattgcccaagcacttaagaataggagaaaccggagagatgcagcagcaatagtcagtggnttcaaatatgaaagggatttcacatactattgttgggctttaaagataggaagtcgtggggggcaagggaaactctctnaagggaaantaatcngggcaacaacctaaataattcccagaaaangggttctttttccagaggtccaggacagagccngtggggttctttccnt

SEQ ID NO: 3662 - DNA, 452 bp, Homo sapiens
  misc_feature (1)..(452): n=a,t,g or c
attttaaatcatgtttattatttaagtttttatcacagtggagattaacttatgtttaatcatccaatcagtgcctactgtcaacttaatcaaattccaaaaaagtaaaatcaactcattcatacactctaagtcctcttactatcccaccattcattgcctgtgtcttttttcccttttaacggcaacatcgtaataagattgtgaaaaggtataactaataagtttctatgtatgtataataccatttcttcaagtattcagagagcagtacatttgtctgcattgtacattagaaaactacttgtgacattatttctaagtgcaggagagcagctcctgggtggggagagtaatgaagttggtttgtcatagtggtatggcccaagggatttaccagcactcnaagaatttttcacaactctttccatggttaagtgaatgacattagg

SEQ ID NO: 3663 - DNA, 579 bp, Homo sapiens
  misc_feature (1)..(579): n=a,t,g or c
cagcagaagagtgacctgattttattcaccttttattggaaatctgtgggacagaactaggcaatgagggtgctacaataataaaggtgagtgttggcagtggcttgaccagagcagaagtgggaatgaaacagttggattctgtttgttttcaaagaagagctcatagaacttactgatggnttgttatgtaggatgtgaaagaaaaccacagaaatgactccaactaaaacagtaaaatgccattcactaatttcaagatgatgagagaagctgttttgcagagataatgaaagaaattctgtttgaagcctattaaagtttgaagtgcatattaattggactttcaagttgagatgtcaagtaagtagcagggtctctgagtatggaatacnaggctgtgggcnagtgacttancgtctgcaacatccacatataggcagcatcnccatagcaacaaacatccngttccaaataatccgccngattttcntcctccacgtccatcttcctcagagtccatcaggggccnccagnactggcnaatccacncatgngcccgttacctccttctcngca

SEQ ID NO: 3664 - DNA, 370 bp, Homo sapiens
  misc_feature (1)..(370): n=a,t,g or c
ttaagacaaaaagatcgtttttattcacttttgattacaaaaaaaggttacatgaataaaataacaatttcctttaagagagggattcctgaatgattaaactgccaaggaaaaaagagtgaattcttccttttaataaaggtgacctaggtcctgaggaagttaggaaaaaagaaaaactcacattatacttgttaaatttgttttcaaatgtgattattaagttgttgtatttattttttgttatagacaaagcaaacccaaaaactagtctaaaaaagaattccnatgcattattaaaagagatagtaataaaatatgtattggtggtgaagaattccacaagcactcaagattggncataaccttt

SEQ ID NO: 3665 - DNA, 445 bp, Homo sapiens
cacaaatctagtttttatttagaagataagattcagatagcccatataaaaactgctgttagataaagctttcaaagtacatgaataatgagtttgtaatgcaaataattattttcatttcccagtgcttgtcagatataacaaataaatgtattgggtagcaaatacaaatgtgaataccataacttatactcaaatatgattatgatcccagagcaaggaggttcagtgcataaaccagccaacgattatgctcacaaaatcaacagcaatatgtaatcagatggacccaggtctcaatcatctctgctcatgggaaacaaggtaacacacccataggtaccctccagtcttttataaatcagtagttccatcctctctcttatccaaagcctttcaccagagtgtgtgggaaaggacaggatggactaactgggaagccctc

SEQ ID NO: 3666 - DNA, 375 bp, Homo sapiens
gaacattaaactgatttttaatatgctaccagcagggattcaggagagcaaactggtaatatgtaatactacatactctgtgtctccataattttactgcataaaggaaaatcttccaaaggaaaaaatcattaaacccaacagcttacagggatctaaatgcctaatacaaaatcaatggctaacctacagtagatcaacactctagttcagcactgtccaatagaaatataatgcaagctgcaaatgtaagccacataatgtaatttaaatttttctagtagccacatttaaaaagtaaaaagtaggcagtgtacagtgggcttatgcctgtcatcacaacactttgggaggctgaggtgggaggatggcctc

SEQ ID NO: 3667 - DNA, 371 bp, Homo sapiens; identical to SEQ ID NO: 2638

SEQ ID NO: 3668 - DNA, 336 bp, Homo sapiens
  misc_feature (1)..(336): n=a,t,g or c
gtngttccaaaataagacatttcattttatttctgaaatcagaataagtcggtgagagtagaaaccactaggtcgagagcaagaactctcccccaaagtggagagaatatttctccctaccctgggctgcggatccctggaaatggggcttcttcctcccacatgttctgctggcacaagtccccttgggcgggctgggctgaagtgggcagggttgggcccctttcacccacccagaaacatgggttcacttgaacgtcaggctctaggatcttcgagggggtccccagtncgctttntgacctgggcccagcaagagcacttcctgacaaccct

SEQ ID NO: 3669 - DNA, 203 bp, Homo sapiens; identical to SEQ ID NO: 3097

SEQ ID NO: 3670 - DNA, 401 bp, Homo sapiens
  misc_feature (1)..(401): n=a,t,g or c
ttaacagntnncagcaacttttatagaaaaggtggttggctctgaaaagacnttntgggttttggttagcacacattcacaagacaatttacgccctctccccacgaatgcggcganaagctggatgtccttgggcatgatagtcactcgcttggcgtgaatggcgcataggttggtgtcctcaaacagccccaccaggtaggcctcgcaggctnnctgcagcgccatcaccgccgagctctgaaaacgcagatcagtcttgaagtcctgcgcgatctcacggactagacgctggaatggcagtttgcgaatcagcagctcggtcgactttctgggtagcggcggatctcgcgcagagccaccgtgccgggccggttaacgtgggggcttcttcacgcctt

SEQ ID NO: 3671 - DNA, 408 bp, Homo sapiens
  misc_feature (1)..(408): n=a,t,g or c
gcaacatttattgaaacttatattagtcaagcaacttaatgctaggctaagctgcagtgagtaataatccctaacctcagtgacagtgcagaaaaagaagggtttcatatctggagtgtgatgcaggtcaatgggagtttccttcacctggtgactcaggtatccaggcacattcatttctgcaggtctgccttcttgacatgaggtcactgcagaaggagagagggtntagagtcatgccagttcttagggtgctccctgacaaggagatcctgcagcactctgcttcacattcctgtttttccagaactcagcccagtacccccaccanaacttcccaaagagtcttggggaagcataggaggaggttcaccagataggcctnggagatcccctcatcactttttg

SEQ ID NO: 3672 - DNA, 358 bp, Homo sapiens
aattattactttttattaatttagagcatttgaagtataaaaataaaaggcttttgacatactgtatatacatacatagccttctgttgtacatcctttccaacgtgttttttaaaatttatatttcagtccaatattcaataaaagggtcattaaaaacaaaacaaaattgtgaaaaaaaagaaataagaatgtgtctctgttgcacaactgcattctatccttgcaggtaatattcttacatccaatgagagcgctgcctgcatagaggtcatgaaattgaacctttaacctctccatgtggatcagatagaaaaggatttctgaagagtgcatttgccagtttaaaagcaacact

SEQ ID NO: 3673 - DNA, 447 bp, Homo sapiens; identical to SEQ ID NO: 3109

SEQ ID NO: 3674 - DNA, 438 bp, Homo sapiens
  misc_feature (1)..(438): n=a,t,g or c
aaggataatgaaaagaaacatttatttacactttgtacatatcgattccaacaaacaataaaaggcctacacatcagtgtaatcataatatatgcgaacttccgatcttctcacactttgcagtgatctgatgctttcactcctggttctgatatttgattttttgaacagccttcttgaaaatgacctacacatgaaaaagtaaattattggatccaggcaaacattacacgcagacaagaaaagtgtaatttctttgcagtaatataggattttttgtgcagattcatctaaaagcctgtcctaagtgactaaaagtaaaaggaattctgcacaagtgatacggtagaaagcaggtaaaaaacacagccacaacaaccctgatgctctggttatgttttcgctttcggcttgactgacttatgaattgcctgcngg

SEQ ID NO: 3675 - DNA, 410 bp, Homo sapiens
  misc_feature (1)..(410): n=a,t,g or c
ttgagtgaatgaatgaaaattattttatttttatttgagctttggttctgccatttgctagcagtgtgactcaagagaagccagtaacccccctgagcttccctagttcacaaaatgcttgtcatgaagtcgacagcttccggagctgcgaggctcnaagaaatgcccacatgaatgtgcgcttagggcgtgagtgctcactccagaaaactccaacacagtgaaaatggcagaagcggtgtttttcttttttacatttttataagaatatataaaaaatgatataaatggacatttacggtagtgggggaaggcatatatctacgttaaaaggcaggacatttttaaaagctctattttctaaatgaaaactacgaaagcggggtgggttgtggcgggggcagttgtgg

SEQ ID NO: 3676 - DNA, 459 bp, Homo sapiens
  misc_feature (1)..(459): n=a,t,g or c
ggctgctgctccttgctggcgggctgcccctgcgcgctcctgaccctctgcagtctctccaggtgcagcgtcctcagatcaggctggtctgggccacgctgctccctgggaggctgctctgtctgcgcaggggtagggggcactggctggagaggggctgggcaccggtccctgctgggggtcccagggctgctcggggtcgcggggccctcttgctcacagtgatgaacctcctcttcccttccccggaactgtcgtgcctcagcccgtgctcctcggctatttggtggacccgcagcctgtcgtgggaattgagggaaggaggaaactccaacttgcatcttcttgctggccatgaacttccactatcatgggcccggaagtggtccacgccaatcttggctctccacttcctctggggcttgcctccgttgaagcttggggctgagatggancttc

SEQ ID NO: 3677 - DNA, 338 bp, Homo sapiens
cttggctggttctttgttctgtcccccatgctctgatgcagtgccctcttcattttcatcttcaccatcctctcgaagaaccatgtctaggatgtttcctttgatcttgaagtctcgtgaggtgctgagcttcatgtgctgcatcaggttcaccttggacttcttagaaaggtggatgagaaatttttcatactgttctatggcaaagatgaggttagggattggcttggtttcccgaagaactctggccatggctgtggcaacggcagcaggtttctcctttttctctcccgtatagttcaggctcttactcttattctgtacgtaagaaatgaaag

SEQ ID NO: 3678 - DNA, 478 bp, Homo sapiens; identical to SEQ ID NO: 3046

SEQ ID NO: 3679 - DNA, 361 bp, Homo sapiens; identical to SEQ ID NO: 2675

SEQ ID NO: 3680 - DNA, 409 bp, Homo sapiens
agagattttcagaaataattttatttacagaaaattcacagaggattaataaaatgtcatgaatacaattttgttggtaataattagcagaatcaagagtagattaatatataaggtaacatgatatattaataatacaaactaaaatatcaattttatgctagctttatccattagtttttcatattccaattttaaacaaatctagaaataagacagtatatatgaaacaaatttgctaaatatttttaaattatgccacctcagatattacctcaattttaaaaccatctgtaaattaaatgaccttcccattataatttctaaatataaagaagcaccagctggaactcaaaatgcataaaagatattgttatatattttaagaaaatattatattagcaatatc

SEQ ID NO: 3681 - DNA, 589 bp, Homo sapiens
  misc_feature (1)..(589): n=a,t,g or c
attcagatgatcttttatttgaggggaaaatgtatgaccgtcactacaagaagctaatcattttcatttaaatggatgatttaaaactaagaagttttcaagaatttcagactacaataaaaaaattcagatttaaatcctgctttccatagcttcaatcctaaaccaagagagtttcaggaattttagataaagcaaagataaattaaaataaaccgttacaacaacctagccatataaaaaggcagtgaccagatagaaagagaagcctttccgtggatattttctccaccaattgcatacggtaaattttcctaaggtaattactttttgcaaaaccaatccaaatgaagacaggagggaaattctcgccttaagcttccccatattgagtttagggccatgatttccaaattgtgtaacaaaggagcttcttctgagggtgatcgggaccaacaggggccatgagaatcattcaaggacaaagccacttgcttccaaagagctgcnaccatgatagcctggtttctggattccaaccgaggattggcaatgtatgcagtaatttttaaaacctggaaaacatttc

SEQ ID NO: 3682 - DNA, 341 bp, Homo sapiens
  misc_feature (1)..(341): n=a,t,g or c
cattttaaaaaaaggaaaaagttttattacgaaactagtttgtataaaacagggttatacatatttttgtaagtttgtaataaaacagtaagaaaaaaaaggcagtaatagaaatctccaaaaggcaacctatcaaaaccaactggctgccactttgagtttngncagtagctgcataaactttgttcttcttgaacagtatttaataacatcattaatacattancaacatttctataaagtaagacacattggtgctgaagtacaactggtggcctcttgatctcacctatgaggagagttctttacaaaaccacatagggaaaattgcagttgtaagg

SEQ ID NO: 3683 - DNA, 226 bp, Homo sapiens
caagacatgggaccctgaagtgctttattatcaggacttattggaagggtttcccagttgcttccaggcaggtgagttgatttgggggtccagttcttcaaatctgtgaggctttttctttctaatgtctgagtcccctgaggagaaaaaaatcaaatgggagcccacaagttcaggtctttcttgtaaatcaggcagtttttagtagacttcccaataggcttcc

SEQ ID NO: 3684 - DNA, 183 bp, Homo sapiens; identical to SEQ ID NO: 3048

SEQ ID NO: 3685 - DNA, 371 bp, Homo sapiens; identical to SEQ ID NO: 3050

SEQ ID NO: 3686 - DNA, 335 bp, Homo sapiens; identical to SEQ ID NO: 3052

SEQ ID NO: 3687 - DNA, 464 bp, Homo sapiens
cttcccaaacaaaaatagatgggtcactccctagaagatctctggcaggttcagtctgagatctctgggagtcaggagcgctgctctcatccccaatcagggcctcatagaaagctcgggctgcagccgcatccagggtggactctggcttctcgggctgtggctgctgctgcccatccttccagaggtcgctggggtcagtggctggggtgaaggtgatgagcaagggccgggacatggcttttgggagaactgagaaaatgataccaggcaagggaaggatgagacaagtaagccaagctcgtggtgaccctgtagcaaccacagcctcagagaccagtaggaaaaaaaaatcagcctggccctttaagtcttccgcgatcccatttcggagtttcctcttcccaaacaaaaatagatgggtcactccctagaagatctcggggagagtctctatacgtgtt

SEQ ID NO: 3688 - DNA, 425 bp, Homo sapiens; identical to SEQ ID NO: 3053

SEQ ID NO: 3689 - DNA, 255 bp, Homo sapiens; identical to SEQ ID NO: 3054

SEQ ID NO: 3690 - DNA, 348 bp, Homo sapiens
tttacaaaaatattttcatttaataaacgtctttgcatgtcacatttaatgggaaacaaaatatcatgttaatagcctagtaatacaattttattaaagtcagtataagttgaaaagtttatcagtgttaataagaatgaaaaatatgtacaatatgcaattactattaaatacaatttgcccatagttgcacattgaattcattatcacggcagttaaatatcagagcttctggtttctcactcttcattcatgtattcagcaaccatgtgctaaggtactaggacaagcactggaattaccagataaagatgatatggtccacccctcaacaactgtttgctataa

SEQ ID NO: 3691 - DNA, 446 bp, Homo sapiens; identical to SEQ ID NO: 3055

SEQ ID NO: 3692 - DNA, 415 bp, Homo sapiens
acagaaaacgaaggcgactattttattagaaaacaaaggctatatgttaatccatcaccagatacgacaatgcttaccaaagaactgtaaaaaattggtctaaaaacagaaaaaagcacaacgacagacgcatggtatagcacacctctaggaagcctgcagccctcactggaaataaacacatacccacacacacatatgtacaggtttcataagcaaagatgtctaaaacagattgtaagagaaagataaacactcctacatgtatatgtgtgcacattttccttaaaaacacataacatgcttttccttcattttactcagctctgagaaattcccgatacaaaactattccatgcctcatactacagataggatatcataaagcaaaagtctacattttcctaggagctgt

SEQ ID NO: 3693 - DNA, 410 bp, Homo sapiens
agattttgctacaccttttattattttaaatatagatcaatgaattacatcaaaactacaagcaacaattagtataaataatactttaatcagtggcagcaaaacattggtcaattctattaaaaaagcatctcgtgtgaacagacatcatgggctgactgacagtgtcatctcccaacaaaaggctgcgatggacaaagtgagatgggagtcagaggagcaatgtcctcagcaaacacttcactctccccctcccccagtcaggaccccaacacggtttttgtttttgtttttaaaacaccaacacaaacacttctggctcatatttaaaggaacaaactggaaacaaataatagcaaatgggcattggagcttttccacacctagctttctccaaagcacgttctcag

SEQ ID NO: 3694 - DNA, 526 bp, Homo sapiens
tttttttttacatggaaatattccatgggatttatttttaacaaacatttacataaacaataaatgaaaaaaaaacaggtttaaagtgagcagattcatatttacagtgtgatttttaaggactgtctatatccaaattttattttcgtgaacgcttacattctaagagcagtacaattagcctattacgtagggccctaatcttgttagtatagtgttgttgaaatactttcttcagcttttgccttaacaaatccaaagatggaagatgatgacaatctggaatattcaacataacatgaaaaaattcattccacatatccaaatgaggaagccttctaaaaagaccttcaggcttacactctcctccttcatttttcactttcatgtaagtgccaaagagcatgcaatatactgttgcagcaaccccaaagtaatcgatctggtagttccatggtttgttgctgagcatctcaacacactgaaaaccagatgtttcacactttgctgtgaatatagttccttt

SEQ ID NO: 3695 - DNA, 454 bp, Homo sapiens
tttttttttggtattataaagacatttatttaatctatgaaaataatgtacaataaatactttccccttttcctattattaaagaattttaataaataatctacagtctaaaacataaaaaagaggaaaataggtccctctagttatttttaagaaagtccccctagagtttaattattcctgagatttcattggaaggagtctaccaaacggaatttttctgtgtgaattttaaaagataaccgagtgcccaatattttagaagaagaagaaagggagtggattaaacgctaattcagtaatacctgaattttagcaaaacacataagtctatgcgactgagggtgggagaggctcgatttttccagtagacggccaaggagcgcgggggtcgaaaggaccgggaggaggaaacaggttagggaaacttcaggtcgatggcacagagcgtact

SEQ ID NO: 3696 - DNA, 361 bp, Homo sapiens
ccttatcaggataaaatgtttatcagtattcaaataaaatatcttaaatggaaagagacaggaaagaacatggttaaatcacagaaaatgaagaaagggagaagctgatcatgatcttgtacaacattatgacagcactaaggtattacgtatccaatacaaggatacttaatagaccaaagaatttaaaatcccagggaactggaataaccagccacaaaagaggcctctctttgttgtggttcacaacacaaaaggccatcaacaaattaggaaatattaaaattaagagagcagcaggtttcttcttggtagacagctcatgctaccatccacaaagtgagcagtggaaggggtattt

SEQ ID NO: 3697 - DNA, 381 bp, Homo sapiens
gacagtgtgaagaatgtaagtcgaaccttatctccttccttacatttcattgtgtcctcgtttctaacccccagtacttccattttcccagtgttgtcacttaggtcaaataatatgtttttcttcttttctgttaccttctggactacaaacaaaccattcacaattgttccaaggggctgagtttgaagcgtgttgatcttcggggtttcaccagcttttcttcttgggtctcaaacgtgaagggcttctttgctttcagtaccataactggcaaacagcgcttctgaaacccttctctgatagattcctgctgggccaccatctgtttctgttcaggcttaacatgaggagagacttttggtgcagcacgttgctttg

SEQ ID NO: 3698 - DNA, 395 bp, Homo sapiens
ttttttctggtacccaaagtgtcctttattctttatcatcctatttgagttttattgtttttacacagctgggaaatgcttaaggtacaaattaataaattttaaactcagtatggaaaatacatttaataaattaaagcaaaaaccaaagatctgaggagatccaagagatcaagacaatctgtaaccagagtctgaagtatccaaggagctactctttttgaggcatattctcctcagcttccagttatcatttgataaacacatcagcaaaaggttcagtgttttaaacaaatgtagactttattttgtactgtacaaagtgctaatgtcagtagatccattaaaatatagaatatttaagaaagatcattaataaaagtaatggtcattca

SEQ ID NO: 3699 - DNA, 436 bp, Homo sapiens; identical to SEQ ID NO: 3060

SEQ ID NO: 3700 - DNA, 510 bp, Homo sapiens
tttttttttttcctgtttttgtttttactggaggctcaggtggcacatgacagatcataaaatggcttcagaggtagggggccgggggaaaacaaaaataaacttggggtgggggcaagaaaagcaaccaggaggaggtaagagctggctggttccttctcagcctgagttacgggagggagttgctgtctctgaacagtaaggatggctcccttccttcaacccttgataaggggagggaagaaaaaagaaaaagcaaaaggctgctgctttggtcctcctgagtctcaaggaaaaggtgaaaagctggtgttttgatgtcatgaattatgggaaagggggagcagggtactgggtagggtacaggtcatttggaaaaactggcagataccagatggcagctctgggtgtcctttgagttgagttggaatcactccaggatggtggtggtggggtcccactgttgacaggggctgaggtctcaggggctgcgggctgccgggggccagg

SEQ ID NO: 3701 - DNA, 312 bp, Homo sapiens
tctgtaatcgactttttattaagattataaatttaaacaatctgaacagttttacccggtgatatacaattcagtatgcacaaaaatacagggtaatgagggaaaagggccgagaaaggaaggattggcaactcgttttggagtccacacggtgctgatggcagagaaccagaggggctgcagacgaaccccacctttttacaacaaaaggcttttaaattaaacaaatctatcgagctgaagacacaggacggggttctcacaggctcgaacaatgctggtttcatgaaatgcaaccgaaggctgaaccaa

SEQ ID NO: 3702 - DNA, 336 bp, Homo sapiens
  misc_feature (1)..(336): n=a,t,g or c
ctgacagcaatagattnntaagtatccccgaaaatataaacacaaaccagtaaaaaacaaaaccgtaaaacgtcaggcctggagctgcaataagacagagacaggagcagctcacacgbggcctaggtggggaggacgaggccataaatactgcaggagggcggcaagggagcccyagggcgaggggaaagcagggtgtcggcagcaagatggctccgggggtttagacactgctggcttcggcccggcgccacctgcctctcactccagctgcgagcagcttcactyggggcctgggctccgactcctcctcgtcgtcttcgtacatctcgccct

SEQ ID NO: 3703 - DNA, 251 bp, Homo sapiens
aagtaatagtacttttaataaaattaagttcttaatagcacatttaatacattaaccctcccccttcttggtttctctgcattttgtgcaacatcactttgacttgattattcttgggtctgttttatttcccgcttttattttgcttttgaaatctttttccttggtggatttgtacgtgtcttcactagatgcctcaaattaagtctgaccacaattctactctactttctacagtggagagaccatcc

SEQ ID NO: 3704 - DNA, 408 bp, Homo sapiens
  misc_feature (1)..(408): n=a,t,g or c
natattttgtattggttttatttaaattttacagaaacctgancagagttaagtatgtaattataagtccagtaacaatttctacaaaaatgcacatacaatgccaganctccttaaaagcaactaatatcatatttgtgttttgcataaaacatgcattaatatgttggccaaaatcagtctctacaagaagagacagtccaatacagtcaataagacanctagttgtgancaacaggtaaaacaagaggtttccagttaatgtgaaagangggantaggtacctttcataaaacaaggcccttcaggcgnctgaggttaactgancgggtactattgtgnctggcacggtaatgtaacacatcacctccaggacttggggncccgattgggtctaggggaggtagg

SEQ ID NO: 3705 - DNA, 505 bp, Homo sapiens; identical to SEQ ID NO: 473
  misc_feature (1)..(505): n=a,t,g or c

SEQ ID NO: 3706 - DNA, 455 bp, Homo sapiens
  misc_feature (1)..(455): n=a,t,g or c
ttttttttttaatttcaaagatacatgaaaatcgttttatttatttaacaaacacaaacaattgaacaaacaatggaagcaagtccttttgcctaaaggaacacagagggtcatgcggatgttgctcctccaaggatttcggtgttccccaacggctagttttgggtctagttcttctggaagatcttattcttggggagctacaggttctggcgtttggggctctttcaggttctatctccattttcccctcaattcctccccattctgctataataaaaaaaaattctcacctccggaagatcccgcctgtgcctccccgccagcctttcaggagggtctggacgtctggtccacccgctccccgggcttctttccccagcttttgctttttnccctcccctggctccccgccctncgggcctcagggaacccgancaaccgnccagcttgag

SEQ ID NO: 3707 - DNA, 596 bp, Homo sapiens
  misc_feature (1)..(596): n=a,t,g or c
canttttactcttttgtccatcgtttcattggctgcacacgcaacatttttgcttgtgttctaatgagtttcaatgtgtacagtactttctttttctttatcctttccctctaacgcttctaaatctcctgagtcacttggaagttttttctttttcatttccctgaataaaaaagacatgaaaaaatttcattcttagaatttgaaattcttagtgccctaaaaaagttccatggggaaggcacatatacagtatataaatggtcatggcttctgcttcacttgataatcaccaagttagaaaatacaaagatgcttaaaatcatcatgtggggaaaaagatgcaagtttttcatctctcatgggatttatctttctttccatcatccaagctcaacatattgtcacccctgactcatcccttactcactagggnccattttgcccntgatcacccttgatgnccagggtctggggntttggaggcctttgtcccacattggattgggagggcttggggatccaataaaccacctgttnccgggttgggtgcctaatgggttaaaaatcccaggntttggtggggnggggttacc

SEQ ID NO: 3708 - DNA, 349 bp, Homo sapiens
  misc_feature (1)..(349): n=a,t,g or c
gctgcgggctaacgtttatttgccagccaaggccccgggncgcctggnttctgctcagaagatcctcacggagtccagctgcacgtccccgcccacctccaccaggcgcacncngcacgcggcacngcggntggcggaagtnggtggtactgggcgtccccaaccacggccttgaagccgtcgtctgacgcgatgatgagcacctcgaagggctgcccgcgctggaaaggaacgcccggcccgcgctcctcgcgccccaggagccttgctcnttgctgttgaagaccacctccgacgtgtccagccgggggttgaaatgcagggcggcatcggaaccctggtcctcccc

SEQ ID NO: 3709 - DNA, 403 bp, Homo sapiens
gtgagaaacaaacagtagaaaaaaaattgaatttatttggctaactcaataatatgaacagcaggaaagatagacacatataaaatgttttggacttggtttgctaagttgatacagataaaatacgacagtaactagaagattacttgagaaactgttaattgaatgagacagtctggatatagtaactatcaatttttccaggctgtataagttagattatcaggagccacatacttgaactcttatctttttagtcaccagaaaaaaaaaaatgcccttgcttcctcatagttagaggcagtgtagcatagtgggtaggagtgcagactgtggatccagacatcctaagttgaaatcctagctcttctgctttctgctggtagtatctgagggtccatca

SEQ ID NO: 3710 - DNA, 425 bp, Homo sapiens
  misc_feature (1)..(425): n=a,t,g or c
tttttgcgggctaacntttatttgccagccaaggccccgggccgcctggnttnctgctcagaagatcctcacggagtccagctgcacgtccccgcccacctccaccaggcgcacngccacgcggcaggcggtggcggaagtggtggtactgggcgtccccaaccacggccttgaagccgtcgtctgacgcgatgatgagcacctcgaagggctgcccgcgctggaaaggaacgcccggcccgcgctcctcgcgccccaaggagccttgctctntgctgttgaagaccacctccgacgtgtccaagccgggggttgaaatgcagcncggcaatcggaaccctgcttcttccccggacaacaaggttttacaatggaaacttgtnggcaatttgggaggaaacaaagccgcgaatttnttaagcaac

SEQ ID NO: 3711 - DNA, 406 bp, Homo sapiens; identical to SEQ ID NO: 512
  misc_feature (1)..(406): n=a,t,g or c

SEQ ID NO: 3712 - DNA, 2493 bp, Homo sapiens
ggaggcgaactgtgggccccggccattcattgccgtggccggcgggcactggggccccgtgttttcagagtcatggaggcgctaattcctgtcataaacaagctccaggacgtcttcaacacggtgggcgccgacatcatccagctgcctcaaatcgtcgtagtgggaacgcagagcagcggaaagagctcagtgctagaaagcctggtggggagggacctgcttcccagaggtactggaattgtcacccggagacctctcattctgcaactggtccatgtgacacaagaagataaacggaaaacaacaggagaagaaaatggggtggaagcagaagaatggggtaaatttcttcacaccaaaaataagctttacacggattttgatgaaattcgacaagaaattgaaaatgaaacagaaagaatttcaggaaataataagggagtaagccctgaaccaattcatcttaagattttttcacccaacgttgtcaatttgacacttgtggatttgccaggaatgaccaaggtgcctgtaggtgatcaacctaaggatattgagcttcaaatcagagagctcattcttcggttcatcagtaatcctaattccattatcctcgctgtcactgctgctaatacagatatggcaacatcagaggcacttaaaatttcaagagaggtagatccagatggtcgcagaaccctagctgtaatcactaaacttgatctcatggatgcgggtactgatgccatggatgtattgatgggaagggttattccagtcaaacttggaataattggagtagttaacaggagccagctagatattaacaacaagaagagtgtaactgattcaatccgtgatgagtatgcttttcttcaaaagaaatatccatctctggccaatagaaatggaacaaagtatcttgctaggactctaaacaggttactgatgcatcacatcagagattgtttaccagagttgaaaacaagaataaatgttctagctgctcagtatcagtctcttctaaatagctacggtgaacccgtggatgataaaagtgctactttactccaacttattaccaaatttgccacagaatattgtaacactattgaaggaactgcaaaatatattgaaacttcggagctatgcggtggtgctagaatttgttatattttccatgagacttttgggcgaaccttagaatctgttgatccacttggtggccttaacactattgacattttgactgccattagaaatgctactggtcctcgtcctgctttatttgtgcctgaggtttcatttgagttactggtgaagcggcaaatcaaacgtctagaagagcccagcctccgctgtgtggaactggttcatgaggaaatgcaaaggatcattcagcactgtagcaattacagtacacaggaattgttacgatttcctaaacttcatgatgccatagttgaagtggtgacttgtcttcttcgtaaaaggttgcctgttacaaatgaaatggtccataacttagtggcaattgaactggcttatatcaacacaaaacatccagactttgctgatgcttgtgggctaatgaacaataatatagaggaacaaaggagaaacaggctagccagagaattaccttcagctgtatcacgagacaagtcttctaaagttccaagtgctttggcacctgcctcccaggagccctcccccgctgcttctgctgaggctgatggcaagttaattcaggacagcagaagagaaactaaaaatgttgcatctggaggtggtggggttggagatggtgttcaagaaccaaccacaggcaactggagaggaatgctgaaaacttcaaaagctgaagagttattagcagaagaaaaatcaaaacccattccaattatgccagccagtccacaaaaaggtcatgccgtgaacctgctagatgtgccagttcctgttgcacgaaaactatctgctcgggaacagcgagattgtgaggttattgaacgactcattaaatcatattttctcattgtcagaaagaatattcaagacagtgtgccaaaggcagtaatgcattttttggttaatcatgtgaaagacactcttcagagtgagctagtaggccagctgtataaatcatccttattggatgatcttctgacagaatctgaggacatggcacagcgcaggaaagaagcagctgatatgctaaaggcattacaaggagccagtcaaattattgctgaaatccgggagactcatctttggtgaagagaactatgtaatactgagactttgttgactcaaaacttgctagttactgcctacctgagtagaatcttatttatgaactcctgtgtattgcaatggtatgaatctgctcatgtggagactggctataaactgaaaagtgtattccaaattgcagaacacatcacacatttaatccaaataataaatggctgtttctaaaaaaaaaaa

SEQ ID NO: 3713 - DNA, 2108 bp, Homo sapiens
gattccggcagtgacagcagtgaggatgatgacgaaggcgacgaggagggagaggacggagcccttgatgacgagggccacagtgggattaaaaagaccactgaggagcaggtgcaggccagcactccttgcccgaggacagagatggcgagcgcccggattggggatgagtatgcggaggacagctctgatgaggaggacatccggaacacggtgggcaacgtgcccttggagtggtacgatgacttcccccacgtgggctacgacctggatggcaggcgcatctacaagcccctgcggacccgggatgagctggaccagttcctggacaagatggacgatcctgactactggcgcaccgtgcaggacccgatgacagggcgggacctgagactgacggatgagcaggtggccctggtgcggcggctgcagagtggccagtttggggatgtgggcttcaacccctatgagccggctgtcgacttcttcagcggggacgtcatgatccacccggtgaccaaccgcccggccgacaagcgcagcttcatcccctccctggtggagaaggagaaggtctctcgcatggtgcacgccatcaagatgggctggatccagcctcgccggccccgagaccccacccccagcttctatgacctgtgggcccaggaggaccccaacgccgtgctcgggcgccacaagatgcacgtacctgctcccaagctggccctgccaggccacgccgagtcgtacaacccaccccctgaatacctgctcagcgaggaggagcgcttggcgtgggaacagcaggagccaggcgagaggaagctgagctttttgccacgcaagttcccgagcctgcgggccgtgcctgcctacggacgcttcatccaggaacgcttcgagcgctgccttgacctgtacctgtgcccacggcagcgcaagatgagggtgaatgtagaccctgaggacctcatccccaagctgcctcggccgagggacctgcagcccttccccacgtgccaggccctggtctacaggggccacagtgaccttgtccggtgcctcagtgtctctcctgggggccagtggctggtttcaggctctgacgacggctccctgcggctctgggaggtggccactgcccgctgtgtgaggactgttcccgtggggggcgtggtgaagagtgtggcctggaaccccagccccgctgtctgcctggtggctgcagccgtggaggactcggtgctgctgctgaacccagctctgggggaccggctggtggcgggcagcacagatcagctgttgagcgccttcgtcccgcctgaggagccccccttgcagccggcccgctggctggaggcctcagaggaggagcgccaagtgggcctgcggctgcgcatctgccacgggaagccagtgacgcaggtgacctggcacgggcgtggggactacctggccgtggtgctggccacccaaggccacacccaggtgctgattcaccagctgagccgtcgccgcagccagagtccgttccgccacagccacggacaggtgcagcgagtggccttccaccctgcccggcccttcctgttggtggcgtcccagcgcagcgtccgcctctaccacctgctgcgccaggagctcaccaagaagctgatgcccaactgcaagtgggtgtccagcctggcggtgcaccctgcaggtgacaacgtcatctgtgggagctacgatagcaagctggtgtggtttgacctggatctttccaccaagccatacaggatgctgagacaccacaagaaggctctgcgggctgtggccttccacccgcggtacccactctttgcgtcaggctcggacgacggcagtgtcatcgtctgccatggcatggtgtacaatgaccttctgcagaaccccttgctggtgcccgtcaaggtgctgaagggacacgtgctgacccgagatctgggagtgctggacgtcatcttccaccccacccagccgtgggtcttctcctcgggggcagacgggactgtccgcctcttcacctagctgttctgcctgcctggggctggggtggtcgtgctgaagtcaacagagcctttaccctg

SEQ ID NO: 3714 - DNA, 40392 bp, Homo sapiens; identical to SEQ ID NO: 3071

SEQ ID NO: 3715 - DNA, 1537 bp, Homo sapiens; identical to SEQ ID NO: 3078

SEQ ID NO: 3716 - DNA, 2750 bp, Homo sapiens; identical to SEQ ID NO: 3079

SEQ ID NO: 3717 - DNA, 3254 bp, Homo sapiens
ggggaggaaacgagctggagcagcatctcatctaccctccttgacacctccccgtggctccagcaagccctagaggtcagccttgcggaccaacaggaggactcccagctttcccttttcaagaggtaccccagacaccggccaccctcttccagcccctgcggccagtgcaaggaggcaccaatgctctgaggctgtcgcgtggtgcagcgtcgagcatcctcgccgagtccttctgctgcctgtcccgcctcaccccgctccatcacaccagctggccctctttgcttccttttcccagaatcgttaagccccgactcccactagcacctcgtaccaacctcgccccaccccatcctcctgccttcccgcgctccggtgtcccccgctgccatgagctcccccatcagcaagagccgctcgcttgccgccttcctgcagcagctgcgcagtccgaggcagcccccgagactggtgacatctacggcgtacacgtcccctcagccgcgagaggtgccagtctgcccgctgacagctggtggcgagactcagaacgcggccgccctgccgggccccaccagctggccactgctggcgagcctgctgcagattctctggaaagggggtctcaagaaacagcacgacaccctggtggagtaccacaagaagtatggcaagattttccgcatgaagttgggttcctttgagtcggtgcacctgggctcgccatgcctgctggaagcgctgtaccgcaccgagagcgtaccccagcggctggagatcaaaccgtggaaggcctatcgcgactaccgcaaagaaggctacgggctgctgatcctggaaggggaagactggcagcgggtccggagtgcctttcaaaagaaactaatgaaaccaggggaagtgatgaagctggacaacaaaatcaatgaggtcttggccgattttatgggcagaatagatgagctctgtgatgaaagaggccacgtcgaagacttgtacagcgaactgaacaaatggtcgtttgaaagtatctgcctcgtgttgtatgagaagagatttgggcttctccagaagaatgcaggggatgaagctgtgaacttcatcatggccatcaaaacaatgatgagcacgtttgggaggatgatggtcactccagtcgagctgcacaagagcctcaacaccaaggtctggcagggacacactctggcctgggacaccattttcaaatcagtcaaagcttgtatcgacaaccggttagagaagtattctcagcagcctagtgcagatttcctttgtgacatttatcaccagaatcggctttcaaagaaagaattgtatgctgctgtcacagagctccagctggctgcggtggaaacgacagcaaacagtctaatgtggattctctacaatttatcccgtaatccccaagtgcaacaaaagcttcttaaggaaattcaaagtgtattacctgagaatcagaggccacgggaggaagatttgaggaatatgccgtatttaaaagcctgtctgaaagaatctatgaggcttaccccgggtgtaccatttacaactcggactcttgacaaggcaacagttctgggtgaatatgctttacccaaaggaacagtgctcatgctaaatacccaggtgttgggatccagtgaagacaattttgaagattcaagtcagtttagacctgaacgttggcttcaggagaaggaaaaaattaatccttttgcgcatcttccatttggcgttggaaaaagaatgtgcattggtcgccgattagcagagcttcaactgcatttggctctttgttggattgtccgcaaatacgacatccaggccacagacaatgagcctgttgagatgctacactcaggcaccctggtgcccagccgggaactccccatcgcgttttgccagcgataatacgcctcagatggtggtatttgctaacatcatatccaactcagggaagcggactgagtgctgggatccaaggcattctacagggttcactgctggtttacacttcacctgtgtcagcaccatcttcaggtgcttagaatggcctgggagcctgttctgtcttgcatcttccatgacatgaaagggaggctggcacttgtcagtcaggtagaggttacaaaccgtttcaggccctgctaccacattcactgtttgaatctttaattcccaagaataagtttacatttcacaatgaatgacctacaacagctaaattttctggggctgggagtaatactgacaatccatttactgtagctctgcttaatgtactacttaggaaaatgtccctgcttaataatgtaagccaagctaaatgatggttaaagttatcaggcctcccatgaaattgcgttcttcctgcattgaaataaaaacattattgggaaactagagaacacctctatttttaaaaggactttaacgaagtcaaacaacttctaagactagtgattcactggggcattatttgttagaggaccttaaaattgtttattttttaaatgtgattcctttatggcattagggtaaagatgaagcaataatttttaaattgtgtatgtgcatatgaagcacagacatgcatgtgtgtgtgtgtctgtgtgtgtgtgtccgtgtatgtgtgtgtgggttctaatggtaatttgcctcagtcatttttttaatatttgcagtacttgatttaggatctgtggtgcagggcatgtttcaaagtttagtcacagcttaaaaacattcagtgtgactttaatattataaaatgatttcccatgccataatttttctgtctattaaatgggacaagtgtaaagcatgcaaaagttagagatctgttatataacatttgttttgtgatttgaactcctaggaaaaatatgatttcataaatgtaaaatgcacagaaatgcatgcaatacttataagacttaaaaattgtgtttacagatggtttatttgtgcatatttttactactgcttttcctaaatgcatactgtatataattctgtgtatttgataaatatttcttcctacattatatttttagaatatttcagaaatatacatttatgtctttatattgtaataaatatgtacatatctaggtatatgctttctctctgctgtgaaattatttttagaattataattcacgtcttgtcatatttcatctgtataccttcaaattctctgaaagtaaaaataaaagtttttaaatatt

SEQ ID NO: 3718 - DNA, 2894 bp, Homo sapiens
ggagaccgcgtctgcttcaacttgggccgtgagctctatttctacccaggctgctgtcgtcgtgggagccaacggtccattgacctcaacaagccaattgacaagcggatctacaagggcacccagcccacctgccacgatttcaaccagttcactgctgccaccgagaccatctcgctgctggtgggcttctcagcgggtcaagtgcagtacctggatctcatcaaaaaggacaccagcaagctgttcaatgaggagcggttgatcgacaagaccaaggtgacatatctgaagtggctgcctgagtcggagagcctgttcctggcatcacacgccagtggccacctgtacctgtacaacgtcagccacccctgcgcctcggccccgccccagtacagcctgctgaagcagggcgagggcttctctgtctatgctgccaagagcaaggcaccccgcaacccgctggccaagtgggcggtgggtgagggtcccctcaacgagttcgccttctcgcccgatggccggcacctggcctgtgtgagccaggatgcgtgcctgcgcgtcttccacttcgactccatgctcctgcgtgggctcatgaagagctactttgggggcctgctgtgtgtgtgctggagccctgacggccgctacgtggtgacgggtggcgaagatgacctggtcaccgtgtggtccttcaccgagggccgcgtggtggctcgaggccatggccacaagtcctgggtcaacgctgtggcctttgactctctctacaccacaagggcagaggaggcggcgacagcagccggtgctgatggggagcggagcggcgaagaggaggaggaggagcccgaggctgcgggcacaggctcggccgggggcgccccactctctccactgcccaaggctggctccattacttaccgctttggctcggcgggccaggacacgcagttctgcctgtgggacctcactgaagacgtgctctacccgcacccgcccctggcccgcacccgcaccctccctggcacacctggcaccacgccaccggccgccagcagctcgaggggtggcgagcctggcccaggccccctgcctcgctcgctgtcccgctccaacagtctcccgcacccagctggcgggggcaaggcgggcggcccgggtgtggcggcagagcctggcacaccattcagcattggccgcttcgccacgctcacactgcaggagcggcgggaccggggggcagagaaggagcacaagcgctaccacagcctgggcaacatcagccggggtggcagtggcggcagtggcagtggtggggagaagcccagcggccctgttccccgcagccgcctggaccccgccaaggtgctgggcactgcgctgtgcccgcgcatccacgaggtgcccctgctggagccccttgtgtgcaagaagatcgcccaggagcggctcacagtcctcctgttcctggaggactgcatcatcactgcctgccaggagggcctcatctgcacctggccgcggccgggcaaggcgttcacagacgaggagaccgaggcccagacaggggaaggaagttggcccaggtcacccagcaagtcagtggtagagggcatctcctcccaaccaggcaactccccgagtggcacagtggtgtgaagccatggatatcgggcccccccaaccccatgcccccagcctcctagccataaccctccctgctgacctcacagatcaacgtattaacaagactaaccatgatggatggactgctccagtccccccacctgcacaaaatttgggggccccccagactggcccggacacgggcgatgtaatagcccttgtggcctcagccttgtcccccacccactgccaagtacaatgacctcttcctctgaaacatcagtgttaccctcatccctgtccccagcatgtgactggtcactcctggggagagactccccgcccctgccacaagagccccaggtctgcagtgtgcccctcagttgagtgggcagggcgggggtggtccagccctcgcccggcccccaccccagctgcccttgctattgtctgtgcttttgaagagtgttaaattatggaagcccctcaggttcctccctgtcccgcaggacctcttatttatactaaagttccctgttttctcagcgggtctgtccccttcggaggagatgatgtagaggacctgtgtgtgtactctgtggttctaggcagtccgctttccccagaggaggagtgcaggcctgctcccagcccagcgcctcccaccccttttcatagcaggaaaagccggagcccagggagggaacggacctgcgagtcacacaactggtgacccacaccagcggctggagcaggaccctcttggggagaagagcatcctgcccgcagccagggcccctcatcaaagtcctcggtgttttttaaattatcagaactgcccaggaccacgtttcccaggccctgcccagctgggactcctcggtccttgcctcctagtttctcaggcctggccctctcaaggcccaggcaccccaggccggttggaggccccgacttccactctggagaaccgtccaccctggaaagaagagctcagattcctcttggctctcggagccgcagggagtgtgtcttcccgcgccaccctccaccccccgaaatgtttctgtttctaatcccagcctgggcaggaatgtggctccccgccaggggccaaggagctattttggggtctcgtttgcccagggagggcttggctccaccactttcctcccccagcctttgggcagcaggtcacccctgttcaggctctgagggtgccccctcctggtcctgtcctcaccaccccttccccacctcctggg

SEQ ID NO: 3719 - DNA, 2187 bp, Homo sapiens
gaattccggcttgggcgcaggtcggagctgggtgggccggctccccggcctggcttgggcgaccatgtccgcatccgcccagcagctggcggaggagctgcagatcttcggcctagactgcgaggaggctctaattgagaaattggtagagctttgtgttcagtatggacagaatgaggagggaatggtaggcgagcttatagccttctgcaccagcacacataaagttggccttacctcagagatcctgaactcttttgagcatgagtttctgagcaaaagattatcgaaagccaggcatagtacctgcaaggacagtggccatgcaggagctagagacattgtttccattcaagagctaattgaagtggaagaagaagaggaaatcctcttgaactcttacaccacaccttcaaagggttctcagaagcgagctatctctaccccagaaacccccctaacaaaaaggagtgtgtcaactcgtagcccccatcagctactctcaccgtcaagtttctctccaagtgctactccctcccagaaatacaactcacgaagtaaccgaggagaagtggttacctccttcggcttagcacagggagtatcttggtctgggagaggaggagctggaaacatcagcctgaaggtcttgggatgtccagaggcactaactgggagctacaaatccatgtttcagaagctcccagacattcgagaagttctgacctgtaagatagaagaacttggcagcgaactcaaggaacattacaagattgaagctttcactcctttgctagccccagcacaggagcctgtcactctgctgggccagattggctgtgatagcaacgggaagctgaacaacaagtcagtgattctcgagggagaccgggaacattcctcgggtgctcaaattccagtggatttatctgagcttaaggaatattctctgtttcctggacaggttgtaattatggaaggaatcaacaccactggtaggaaacttgttgccaccaaactctacgagggtgtgccacttccattttatcagcccactgaagaggatgcagactttgagcaaagcatggtcctggttgcctgtggaccatacaccacatctgacagcatcacgtatgaccccctgcttgacctgattgctgtcatcaaccatgaccggccagatgtctgcatcctgtttggccctttcctggagtctaagcatgaacaggtggagaattgtctactgacaagtccatttgaagacattttcaagcagtgtctacgaacaattattgaaggcacaagaagctccggctcccaccttgtctttgtcccgtcattgagagatgtgcaccatgagcctgtgtacccccagccgcctttcagctactccgatctgtctcgagaggacaaaaagcaagtacagtttgtgtccgagccctgcagcctctccataaacggagtgatcttcggcttgacatccacagatctgcttttccacctgggggccgaggagatcagtagttcttccggaacttcagacagattcagccgaatactcaagcacatcttgacccagaggagctactacccactctacccgccccaagaagacatggccattgactatgagtcgttctatgtttacgcacagctgcctgtcaccccagatgtcctcatcatcccgtcagagctgaggtacttcgtgaaggatgtcctcggctgtgtctgtgtgaaccctgggcgccttaccaaagggcaggtgggaggcaccttcgcccgactctaccttaggaggccggcagcggacggggcagagaggcagagcccatgcattgctgtgcaggtcgtcaggatctgaggcttctgtcctctgctgttctctgctgtgtgggcccttaaagtcttagccaagagccaagacatagccctgtgacaaggtgaacagttgggtgggaaaggagagaggagccagccagggaggggcagctgcagtgaccaggcccagcaggaggacttgtgcagccgggcctgcctgtgagtggtgcctctcctggaagaagctcttgcttctcagtccatgctccgtgtccagaagtaagccagctgtggatcccgcccactcagaaaaggcgagaaggctttgtgattttctacatgaatcaaacacagaaacaccggaattcc

SEQ ID NO: 3720 - DNA, 1438 bp, Homo sapiens
atcaaggtgatcccaaaacgaaccaacagaccaggcatcagcacaacagaccggggttttccacgagcccgctaccgcgcccggaccaccaactacaacgtccggctttctgagttgggtggcgggaaaggcgatgagtaaaggccgggcagaagctgcgggagccgccgggatcctcctgaggtacctgcaggagcagaaccggccctacagctcccaggatgtgttcgggaacctacagcgggaacacggactgggcaaggcggtggtggtgaagacgctggagcagctggcgcaacaaggcaagatcaaagagaagatgtacggcaagcagaagatctattttgcggatcaggaccagtttgacatggtgagtgatgctgaccttcaagtcctagatggcaaaatcgtggccctcactgctaaggtgcagagcttgcagcagacgtgccgctacatggaggctgagctcaaggaattatctagtgccctgaccacaccagagatgcagaaagaaatccaggagttaaagaaggaatgcgctggctacagagagagattgaagaacattaaagcagctaccaatcatgtgactccagaagagaaagagcaggtgtacagagagaggcagaagtactgtaaggagtggagggaagaggaagaggatggctacagagctgtcttgatgcaatacttgaaggataccccaagagcaagaagcagttctttgaggaagttgggatagagacggatgaagattacaacgtcacactcccagacccctgaggggcccacggtcaggactggtggggactgcaggatgtcagaagagtgagatgtcttgcactggctaccttgtttttggttggcttttgttgttgttcctcttacttttcactttagcagagcagtcaggagacaagcataaaccagagcactgggtagagaggatgagggctggtggctgggggtagaccccacgcatttcattgtctaaattgcagtagcttgaggttaacatttagacttggaacaatgctaaaggaaagcatttggcaatatttattataatttaattttatataaaaatatttaatttcctctggatagtcaaacctgccagatatcaaacctgaggaaggcagaagtgaatttggagaactagggtagagagaggttgctataaaacgagcatttggagggcccacggcttcactcaggacctgctgggcttgtgtaccccaggagcccttttaagtatcttttgtacgcttttcaccccacccccaagtcctgggagaaatgcaggcaacactgagacatgggagaggccaagatatgcttgacagaaagggtgattttgaggctcagttaatatttcaaaattgtaaccgtagcaaaactgcattggtatttagaaaaataaaaaatttccaat

SEQ ID NO: 3721 - DNA, 1359 bp, Homo sapiens
ctttttggtgtaaatctggactctaattctgtaatatatcaaggaatctcgtaaaaccgacactaaaacgtccctgcctacaaatcatccggccaaattatgagttcattgtattatgcgaatgctttattttctaaatatccagcctcaagttcggttttcgctaccggagccttcccagaacaaacttcttgtgcgtttgcttccaacccccagcgcccgggctatggagcgggttcgggcgcttccttcgccggctcgatgcagggcttgtaccccggcggggggggcatggcgggccagagcgcggccggcgtctacgcggccggctatgggctcgagccgagttccttcaacatgcactgcgcgccctttgagcagaacctctccggggtgtgtcccggcgactccgccaaggcggcgggcgccaaggagcagagggactcggacttggcggccgagagtaacttccggatctacccctcgatgcgaagctcaggaactgaccgcaaacgaggccgccagacctacacccgctaccagaccctggagctggagaaggaatttcactacaatcgctacctgacgcggcggcggcgcatcgagatcgcgcacgcgctctgcctcacggaaagacagatcaagatttggtttcagaaccggcgcatgaagtggaaaaaggagaacaagaccgcgggcccggggaccaccggccaagacagggctgaagcagaggaggaagaggaagagtgagggatggagaaagggcagaggaagagacatgagaaagggagacgaagagaagcccagctctgggaactgaatcaggaaactcaaatcgaatagggaagtaaaaaaacaaaacaaaaaacaaaaaaaaacaaaaaaaaaccctatttaaatgaaaggagtttaaaaacattttttaaggagggagaaaggagaaattttggtttttcaacactgaaaaaatagtacctataggaaagtctgtcaggtttggtttttttgtacaatatgaaaaggacattatctacctgttctgtagctttctggaatttacctccccttttctatgttgctattgtaaggtctttgtaaaatcttgcagttttgtaagccctctttaatgctgtctttgtggactgtgggtctggactaaccctgtggttgcctgccctcctgtgcctccgccttcccagcagcggcaccaaggggccttagggagccccaaaacctaccactcgcgtgttccccaagcgccttgctgctgctgcttgcttcccgtcccccagccccatgctccctttacattctgtgtgtatctaaaggatggaaaaataaaacgcaattaaaaat

SEQ ID NO: 3722 - DNA, 1452 bp, Homo sapiens; identical to SEQ ID NO: 1008

SEQ ID NO: 3723 - DNA, 2218 bp, Homo sapiens; identical to SEQ ID NO: 3084

SEQ ID NO: 3724 - DNA, 871 bp, Homo sapiens; identical to SEQ ID NO: 3085

SEQ ID NO: 3725 - DNA, 1764 bp, Homo sapiens
ccgggatgcgaaggagcgggacaccatgaaggaggacggcggcgcggagttctcggctcgctccaggaagaggaaggcaaacgtgaccgtttttttgcaggatccagatgaagaaatggccaaaatcgacaggacggcgagggaccagtgtgggagccagccttgggacaataatgcagtctgtgcagacccctgctccctgatccccacacctgacaaagaagatgatgaccgggtttacccaaactcaacgtgcaagcctcggattattgcaccatccagaggctccccgctgcctgtactgagctgggcaaatagagaggaagtctggaaaatcatgttaaacaaggaaaagacatacttaagggatcagcactttcttgagcaacaccctcttctgcagccaaaaatgcgagcaattcttctggattggttaatggaggtgtgtgaagtctataaacttcacagggagaccttttacttggcacaagatttctttgaccggtatatggcgacacaagaaaatgttgtaaaaactcttttacagcttattgggatttcatctttatttattgcagccaaacttgaggaaatctatcctccaaagttgcaccagtttgcgtatgtgacagatggagcttgttcaggagatgaaattctcaccatggaattaatgattatgaaggcccttaagtggcgtttaagtcccctgactattgtgtcctggctgaatgtatacatgcaggttgcatatctaaatgacttacatgaagtgctactgccgcagtatccccagcaaatctttatacagattgcagagctgttggatctctgtgtcctggatgttgactgccttgaatttccttatggtatacttgctgcttcggccttgtatcatttctcgtcatctgaattgatgcaaaaggtttcagggtatcagtggtgcgacatagagaactgtgtcaagtggatggttccatttgccatggttataagggagacggggagctcaaaactgaagcacttcaggggcgtcgctgatgaagatgcacacaacatacagacccacagagacagcttggatttgctggacaaagcccgagcaaagaaagccatgttgtctgaacaaaatagggcttctcctctccccagtgggctcctcaccccgccacagagcggtaagaagcagagcagcgggccggaaatggcgtgaccaccccatccttctccaccaaagacagttgcgccgctgctccacgttctcttctgtctgttgcagcggaggcgtgcgtttgcttttacagatatctgaatggaagagtgtttcttccacaacagaagtatttctgtggatggcatcaaacagggcaaagtgttttttattgaatgcttataggttttttttaaataagtgggtcaagtacaccagccacctccagacaccagtgcgtgctcccgatgctgctatggaaggtgctacttgacctaagggactcccacaacaacaaaagcttgaagctgtggaggcgcacggtggcgtggctctcctcgcaggtgttctgggctccgttgtaccaagtggagcaggtggttgcgggcaagcgttgtgcagagcccatagccagctgggcagggggctgccctctccacattatcagttgacagtgtacaatgcctttgatgaactgttttgtaagtgctgctatatctatccattttttaataaagctaatactgtttctttagagcacactggcgggtcgt

SEQ ID NO: 3726 - DNA, 2311 bp, Homo sapiens
gatttaatcctatgacaaactaagttggttctgtcttcacctgttttggtgaggttgtgtaagagttggtgtttgctcaggaagagatttaagcatgcttgcttacccagactcagagaagtctccctgttctgtcctagctatgttcctgtgttgtgtgcattcgtcttttccagagcaaaccgcccagagtagaagatggattggggcacgctgcagacgatcctggggggtgtgaacaaacactccaccagcattggaaagatctggctcaccgtcctcttcatttttcgcattatgatcctcgttgtggctgcaaaggaggtgtggggagatgagcaggccgactttgtctgcaacaccctgcagccaggctgcaagaacgtgtgctacgatcactacttccccatctcccacatccggctatgggccctgcagctgatcttcgtgtccagcccagcgctcctagtggccatgcacgtggcctaccggagacatgagaagaagaggaagttcatcaagggggagataaagagtgaatttaaggacatcgaggagatcaaaacccagaaggtccgcatcgaaggctccctgtggtggacctacacaagcagcatcttcttccgggtcatcttcgaagccgccttcatgtacgtcttctatgtcatgtacgacggcttctccatgcagcggctggtgaagtgcaacgcctggccttgtcccaacactgtggactgctttgtgtcccggcccacggagaagactgtcttcacagtgttcatgattgcagtgtctggaatttgcatcctgctgaatgtcactgaattgtgttatttgctaattagatattgttctgggaagtcaaaaaagccagtttaacgcattgcccagttgttagattaagaaatagacagcatgagagggatgaggcaacccgtgctcagctgtcaaggctcagtcgccagcatttcccaacacaaagattctgaccttaaatgcaaccatttgaaacccctgtaggcctcaggtgaaactccagatgccacaatgagctctgctcccctaaagcctcaaaacaaaggcctaattctatgcctgtcttaattttctttcacttaagttagttccactgagaccccaggctgttaggggttattggtgtaaggtactttcatattttaaacagaggatatcggcatttgtttctttctctgaggacaagagaaaaaagccaggttccacagaggacacagagaaggtttgggtgtcctcctggggttctttttgccaactttccccacgttaaaggtgaacattggttctttcatttgctttggaagttttaatctctaacagtggacaaagttaccagtgccttaaactctgttacactttttggaagtgaaaactttgtagtatgataggttattttgatgtaaagatgttctggataccattatatgttccccctgtttcagaggctcagattgtaatatgtaaatggtatgtcattcgctactatgatttaatttgaaatatggtcttttggttatgaatactttgcagcacagctgagagaggctgtctgttgtattcattgtggtcatagcacctaacaacattgtagcctcaatcgagtgagacagactagaagttcctagttggcttatgatagcaaatggcctcatgtcaaatattagatgtaattttgtgtaagaaatacagactggatgtaccaccaactactacctgtaatgacaggcctgtccaacacatctcccttttccatgctgtggtagccagcatcggaaagaacgctgatttaaagaggtgagcttgggaattttattgacacagtaccatttaatggggagacaaaaatgggggccaggggagggagaagtttctgtcgttaaaaacgagtttggaaagactggactctaaattctgttgattaaagatgagctttgtctaccttcaaaagtttgtttggcttacccccttcagcctccaattttttaagtgaaaatataactaataacatgtgaaaagaatagaagctaaggtttagataaatattgagcagatctataggaagattgaacctgaatattgccattatgcttgacatggtttccaaaaaatggtactccacatacttcagtgagggtaagtattttcctgttgtcaagaatagcattgtaaaagcattttgtaataataaagaatagctttaatgatatgcttgtaactaaaataattttgtaatgtatcaaatacatttaaaacattaaaatataatctctataat

SEQ ID NO: 3727 - DNA, 2838 bp, Homo sapiens
gggcgcagagctgggccgagccgtcgccggcgccacgcgagtcccgcagccgccgcgcccgggcaatgggccgggggcactgagggccgccggggccgagcgcggaggggggaccgagccagtgccgtgccctcgggccgcgccaacatgccccgcggcttcctggtgaagcgcagcaagaagtccacgcccgtttcctaccgggtccgcggcggcgaggacggcgaccgcgcactgctgctctcgcccagctgcgggggcgcccgcgccgagcccccggcgccgagcccggtccccgggccgctgccgccgccgccgcccgcggagcgcgcccatgcagcgctcgccgccgcgcttgcctgcgcgcctgggccgcagccacccccgcagggcccgcgggccgcgcacttcggcaaccccgaggctgcgcaccccgcgccgctctacagtcccacgcggcccgtgagccgcgagcacgagaagcacaagtacttcgaacgcagcttcaacctgggctcgccggtctcggccgagtccttccccacgcccgccgcgctgctcggagggggcggcggcggcggcgcgagcggagctggcggaggcggcacctgcggcggcgacccgctgctcttcgcgcccgccgagctcaagatgggcacggcgttctcggctggcgccgaggcggcccgcggcccgggccccggccccccactgccccctgccgccgccctgcggcccccgggaaagcggcccccgccccctaccgccgcggagccgcccgccaaggcagtcaaggccccgggcgccaagaagcccaaggccatccgcaagctgcacttcgaggacgaggtgaccacgtcgcccgtgctggggctcaagatcaaggagggcccggtggaggcgccgcggggccgcgcggggggcgcggcgcggccgctgggcgagttcatctgccagctgtgcaaggaggagtacgccgacccgttcgcgctggcgcagcacaaatgctcgcgcatcgtgcgtgtggagtaccgctgtcccgagtgcgccaaggtcttcagctgcccggccaacctggcctcgcaccgccgctggcacaaaccgcggcccgcgcccgccgccgcccgcgcgccggagccagaagcagcagccagggctgaggcgcgggaggcacccggcggcggcagcgaccgggacacgccgagccccggcggcgtgtccgagtcgggctccgaggacgggctctacgagtgccatcactgcgccaagaagttccgccgccaggcctacctacgcaagcacctgctggcgcaccaccaggcgctgcaggccaagggcgcgccgctagcgcccccggccgaggacctactggccttgtaccccgggcccgacgagaaggcgccccaggaggcggccggcgacggcgagggggccggcgtgctgggcctgagtgcgtccgccgagtgccacctgtgcccagtgtgcggagagtcgttcgccagcaagggcgctcaggagcgccacctgcgcctgctgcacgccgcccaggtgttcccctgcaagtactgcccggccaccttctacagctcgcccggccttacgcggcacatcaacaagtgccacccatccgaaaacagacaggtgatcctcctgcaggtgcccgtgcgcccggcctgctagagcgcgccctccaccccggcccccgaactgtgccttcgcttggagacccacaaagagagtgcgccctgcacgccccgaacccgagtccgcgctgggggagcctcgcccccgcccccaccgggtgagagtgtcgtctccgcttctctcggtgtggcgtgacggtaaccccatactctccttttgactccttttggaacccccacttttacgttgtgtccctccgcctcccccatggcgcaacaggagtcagtctctttctgtacaagggagaaaagctgtacgcgtttgtctcgtggttggaagcctccccttggcggggagaagctttttttcttgctagtattcgctgtgttcatggtctagaaatgcggtctggtctcgcctcgcctaccaatctctgctctctatgtatgtagcgtacgggttgttttgggtgaatcttgaggaataaatgcctttatatttcacaggctgtaaattgaacttcccacacgattagctttattatggcttgtgaactgctggagtctggctttacctttttgtatgtgaacaaatcaaattgcttaaaaaagagttttctttagtatagccacaaatgccttgaactgttgtctgggattgttttgtggggggagggaagggagtgttccgaagatgctgtagtaactgcctcagtgtttcacgtaagactttttggtttgatcatctttgttgaggtaggactatcagttccctctaaatgtatatgttgatttatgagtaattgttatttattctttatttatttatattaattatgaagattatgatattatttgattgcagatttttttggcgcgctgccccctccccaccctgccactcttgacattccactgtgcgttttagaagagagcctttttctaaagggatctgcttaaagttttaacttttatacctatctgagtgaattacagacaacctatcatttattctgcttcgagggtccccagggcccttgtacaaccgacagctcttacttttaaatgcaatctcttttctacatacattattttcttaattgttagctatttatagaaagcttcaatagaactgtttcaactgtataactatttactattcaaataaaatattttcaaagtcaaaaaaaaaaaa

SEQ ID NO: 3728 - DNA, 3608 bp, Homo sapiens
ttacaccttggccgcagcggcaggtccttcctcgtgctttcggtggcgacatggagctggaggagttggggatccgagaggaatgtggcgtgttcgggtgcatcgcctcaggagagtggcccacgcagctggatgtaccgcatgtgatcactctgggactcgtggggctgcagcaccggggtcaggagagtgctggtattgtgactagtgatgggagttcggtgccaacattcaaatcacacaagggaatgggtcttgtaaatcacgtctttactgaagacaatttgaaaaaattatatgtttcaaatcttggaattggacacaccaggtatgccaccacaggaaaatgtgaactagaaaattgtcagcccttcgttgttgaaacacttcatgggaagatagctgtggcacataatggcgaattggtaaatgctgctcgattaaggaaaaagcttctgcgtcatggtattggtctgtctacaagttctgatagtgaaatgattacccagttactggcgtatacccctcctcaggaacaagatgacaccccagactgggtagccaggattaaaaacttgatgaaggaagcacccacagcatactccctgcttataatgcacagagatgttatttatgcagtacgagatccttatggaaatcgtcccttatgcattggtcgtcttattccagtgtctgatataaatgacaaagagaaaaaaacatcagaaacagaaggatgggtggtgtcttcagaatcttgtagcttcttatctattggtgcaagatattaccgtgaagtcttgcctggagaaattgtggaaatatccagacacaatgtccaaactcttgatattatatcaaggtctgaaggaaacccagtggctttttgtatctttgaatatgtttattttgcaagaccagacagtatgttcgaagaccaaatggtttatacagtaagataccgttgtggccagcagctagcgattgaagcacctgtggatgcagatttggttagcactgttccagaatctgctacgcctgctgctcttgcttacgcaggaaagtgtggacttccatatgtggaggtgctgtgtaaaaaccggtatgtagggagaaccttcattcagccaaacatgaggttaagacaacttggtattgcaaaaaaatttggagtattgtcagacaactttaaaggcaaaagaattgttcttgtagatgattcaattgtcagaggcaataccatctcacctataataaaactgctcaaagaatctggtgcaaaagaggtacacattcgagtagcttcaccaccaattaaatatccatgcttcatgggaataaacattcctacaaaagaagagctcattgccaataaaccagaatttgatcaccttgcagaatatctaggagcaaacagtgttgtgtatctgtcagtagaaggactggtttcatctgtacaagaagggataaagtttaaaaaacagaaagagaaaaagcacgatattatgatccaagaaaatggaaatggtctggaatgttttgaaaagagtggtcattgtacagcttgtctcactggaaaatatcctgtagaattagaatggtagctggtagggttggatgtgtgtagtttcaagatagaaagttggtcaagaagttatagtggtcacacctcatctatttactgttactcagttggtacaatgtaaaatgccatgcttatgtttataagttttgagatttttttttttttctgaaaaggataccaaagtgcgataactgaacatttccaattgcatataatacaacaatatgtggtgttcttttttttacacaagcattggctagcctttttaacctggtcagagaaggcaggtggtcactgacatttcccaagtccatgctttaaagggtttgcaagaagttagggttaaggagaggtgatgccaacaagacaggtgagttaaatataccatttcacacaaagtttgaatagaatacattatacctcataggtgtctagcctctacagttctggctgtagttatgaccttggcttccctgtctaactgtagacaaatctttaaaaaaaaaaaaaaaaaatctggtgcctcagtttccccacatgtgcaatgggatacttattaaataattaataagaatgtgaataagtgtcatacttttgtgatttgagccatcatttcacttctgattttaagacaactcatgattgttagctttcagaaagctaatgattgttaactttttgaaattagtttacaattaattaagatttcattatgatggaaggagacataattggcagatctttgccatctctctttgagatgtcctaaaaagggttgtaaaaatctgtgaaaaagtttttcctacatttgactagaaaatgtgatccatagtatttagtgccctgatactataagctcagcaagtaacctggtacatttgaaataaaaaccaaatttttagattcaaacaatccctttatccttaatttaattaattatcatatgctttttttaatgaagtgcttgatcacttgcaaacatatatacatgtagatgtacatatacatgtacacatacacataaatattattgcaattaagtgatcaagtacagacacaataggggccagttttgtttaaggatcaaagagacaaccactttggggaattagtatcaacttacaatccaagtccaagtatcatcttataatcacttttttctactatattaagatctaatgaatttgatttcttttttgaagttttttcttgtaacatctgagattagaagtttaagatgacttgaccccaaacctttgtttatgtaagaatttttaaacataaaagtgtttgtttctgttatgttaccataatttgatgtatatagtgtccagatccatttagaaatttaatatttattaataactgaaactgtttgtcttcctttggtatatagtctcgcatattatattatagcaggccaagataaaattttgacagctctttaagcccacatgcagcagtgggtcagataaccctgtggcagtgacacgggcaaattggcatttgaataaagccctgggaccacctcaacatgcgtagcctcttgtcttaaatgtactccccatggcagcatggaggaggcaagacctgtgggtcaattttgaactggccttactttgatttttaaaacaagagactcagggaaagtactaaaccaaaatctctgattttactttgcgttttctgtagtttttgttttactgagatgcttttgtaaaggaaaataatactgtgacagtttagtaattctacagattcttaatatttctccatcatggccttttacttcacaattttctgaagtctgaattcaattacaattttttttttttaccaatttaatctcaaatgttgtttaactgctttaaattcatatacgtagagtattataaactgcagagatgaaaaatgtgttttcacgggatttatattgtgaactaaactaagcctactttttgtgacttatttgtgatgccttgttgataaatatgtgtaataagtatgtttaaaaaaaaaaaaa

SEQ ID NO: 3729 - DNA, 10172 bp, Homo sapiens
atggggagaagacggaggctgtgtctccagctctacttcctgtggctgggctgtgtggtgctctgggcgcagggcacggccggccagcctcagcctcctccgcccaagccgccccggccccagccgccgccgcaacaggttcggtccgctacagcaggctctgaaggcgggtttctagcgcccgagtatcgcgaggagggtgccgcagtggccagccgcgtccgccggcgaggacagcaggacgtgctccgagggcccaacgtgtgcggctccagattccactcctactgctgccctggatggaagacgctccctggaggaaaccagtgcattgtcccgatttgtagaaatagttgtggagatggattttgttcccgtcctaacatgtgtacttgttccagtgggcaaatatcatcaacctgtggatcaaaatcaattcagcagtgcagtgtgagatgcatgaatggtgggacctgtgcagatgaccactgccagtgccagaaaggatatattggaacttattgtggacaacctgtctgtgaaaatggatgtcagaatggtggacgttgcatcgcccaaccgtgtgcttgtgtttatgggttcactggtccacagtgtgaaagagattacaggacaggcccgtgtttcactcaggtcaacaaccagatgtgccaagggcagctgacaggcattgtctgcacgaagactctgtgctgtgccaccactggacgggcgtggggccatccctgtgagatgtgtccagcccagcctcagccctgccgacggggtttcatccccaacatccgcactggagcttgccaagatgttgatgaatgccaggctatcccagggatatgccaaggaggaaactgtatcaatacagtgggctcttttgaatgcagatgccctgctggtcacaaacagagtgaaactactcagaaatgtgaagacattgatgagtgcagcatcattcctgggatatgtgaaactggtgaatgttccaacaccgtgggaagctatttttgtgtttgtccacgtggatatgtaacctcaacagatggctctcgatgcatcgatcagagaacaggcatgtgtttctcgggcctggtgaatggccgctgtgcacaagagctcccggggagaatgacgaaaatgcagtgctgctgtgagcctggccgctgctggggcatcggaaccattcctgaagcctgtcctgtcagaggttctgaggaatatcgcagactttgcatggatggacttccaatgggaggaattccagggagtgctggttccagacctggaggcactgggggaaatggctttgccccaagtggcaatggcaatggctatggcccaggagggacaggcttcatccccatccctggaggcaatggcttttctcctggcgttgggggagccggtgtgggggccgggggacagggacctatcatcactggactaacaattctgaaccagacaatagatatctgtaagcatcatgctaacctttgtttaaatggacgctgtataccaactgtctcaagctaccgatgtgaatgcaacatgggttataagcaggatgcaaatggagattgtatagatgttgatgaatgcacatcaaatccctgcactaatggagattgtgttaacacacctggttcctattattgtaaatgtcatgctggattccagaggactcctaccaagcaagcatgcattgatattgatgagtgcatccagaatggggttctttgtaaaaacggtcgatgcgtgaactcagatggaagtttccagtgcatttgcaatgccggctttgaattaactacagatggaaaaaactgtgttgatcatgatgaatgtacaactaccaacatgtgtttgaatggaatgtgcatcaatgaagatggcagcttcaagtgcatctgcaaaccaggatttgtcttggctccaaatgggcgttactgtactgatgttgatgaatgccagaccccaggaatctgcatgaatgggcactgcatcaacagtgaagggtccttccgctgtgactgtcccccaggcctggctgtgggcatggatggacgtgtgtgtgttgatactcacatgcgcagtacctgctatggaggaatcaagaaaggagtgtgtgtgcgtcctttccccggtgcagtgaccaagtccgaatgctgctgtgccaatccagactatggttttggagaaccctgccagccatgccctgcaaaaaattcagctgaattccacggcctttgtagtagtggagtaggtatcactgtggatggaagagatatcaatgaatgtgctttggatcctgatatatgtgccaatgggatttgtgaaaacttacgtggtagttaccgttgtaattgcaacagtggctatgaaccagatgcctctggaagaaactgtattgacattgatgaatgtttagtaaacagactgctttgtgataacggattgtgccgaaacacgccaggaagttacagctgtacgtgcccaccagggtatgtgttcaggactgagacagagacctgtgaagatataaatgaatgtgaaagcaacccatgtgtcaatggggcctgcagaaacaaccttggatctttcaattgtgaatgttcgcccggcagcaaactcagctccacaggattgatctgtattgacagcctgaaggggacctgttggctcaacatccaggacagccgctgtgaggtgaatattaatggagccactctgaaatctgaatgctgtgccaccctcggagccgcctgggggagcccctgtgagcggtgtgaactagatacagcttgcccaagagggcttgccaggattaaaggtgttacgtgtgaagatgttaatgagtgtgaggtgttccctggcgtttgtccaaatggacgctgtgtcaacagtaagggatcttttcattgcgagtgccctgaaggccttacgttggatgggactggccgtgtatgtttggatattcgcatggagcagtgttacttgaagtgggatgaagatgaatgcatccaccccgttcctggaaagttccgcatggatgcctgctgctgtgctgtcggggcggcttggggcaccgagtgtgaggagtgccccaaacctggcaccaaggaatacgagacactgtgcccccgcggggctggctttgctaaccgaggggatgttcttactgggcggccattttacaaagacatcaatgaatgcaaagcatttcctgggatgtgcacttatgggaagtgcagaaatacaatcggaagcttcaaatgccgttgcaatagtggctttgctctagacatggaggaaagaaactgcacggacatcgacgagtgcaggatttctcctgacctctgtggcagtggaatctgcgtcaatacaccgggcagctttgagtgcgagtgcttcgaaggctatgaaagtggcttcatgatgatgaagaactgcatggacattgacggatgtgaacgtaaccctctcctttgtaggggtggcacctgtgtgaacactgagggcagctttcagtgtgactgcccactgggacacgagctgtcaccatcccgtgaggactgtgtggatattaatgaatgctccctgagtgacaatctctgcagaaatggaaaatgtgtgaacatgattggaacctatcagtgctcttgcaatcctggatatcaggctacgccagaccgccagggctgtacagatattgatgaatgtatgataatgaacggaggctgtgacacccagtgcacaaattcagagggaagctacgaatgcagctgcagtgagggttatgccctgatgccagatgggagatcgtgtgcagacattgatgaatgtgaaaacaatcctgatatctgtgatggcggccagtgtaccaacattcctggagagtatcgctgcctctgctatgatggcttcatggcttccatggacatgaaaacatgcattgatgtcaatgaatgtgacctaaattcaaatatctgcatgtttggggaatgtgagaacacaaagggatccttcatttgccactgtcagctgggttactcagtgaagaaggggaccacaggatgtacagatgtggatgagtgtgaaattggtgctcataactgcgacatgcatgcctcatgtctgaatatcccaggaagcttcaagtgtagctgcagagaaggctggattggaaacggcatcaagtgtattgatctggacgaatgttctaatggaacccaccagtgtagcatcaatgctcagtgtgtaaataccccgggctcataccgctgtgcctgctccgaaggtttcactggtgatggctttacctgctcagatgttgatgagtgtgcagaaaacataaacctctgtgagaacggacagtgccttaatgtcccgggtgcatatcgctgcgagtgtgagatgggcttcactccagcctcagacagcagatcctgccaagatattgatgaatgctccttccaaaacatttgtgtctctggaacatgtaataacctgcctggaatgtttcattgcatctgcgatgatggttatgaattggacagaacaggagggaactgtacagatattgatgagtgtgcagatcctataaactgtgtcaatggcctatgtgtcaacacgcctggtcgctatgagtgtaactgcccacccgattttcagttgaacccaactggtgtgggttgtgttgacaaccgtgtgggcaactgctacctgaagtttggacctcgaggagatgggagtctgtcttgcaacaccgagatcggggtgggcgtcagtcgctcttcatgctgctgctctctgggaaaggcctggggaaacccctgtgagacatgcccccctgtcaatagcactgaatattacaccctgtgtcccggaggtgaaggcttcagacctaaccccatcacaatcattttagaagacattgacgaatgccaggagttaccaggtctctgccagggtggaaactgcatcaacacttttgggagcttccagtgtgagtgcccacaaggctactacctcagcgaggatacccgcatctgtgaggatattgatgagtgttttgcacatcctggtgtgtgtgggcctgggacctgctataacaccctgggaaattacacctgcatttgcccacctgagtacatgcaggtcaatggaggccacaactgcatggacatgagaaaaagcttttgctaccgaagctataatggaaccacttgtgagaatgagttgcctttcaatgtgacaaaaaggatgtgctgctgcacatataatgtgggcaaagctgggaacaaaccttgtgaaccatgcccaactccaggaacagctgactttaaaaccatatgtggaaatattcctggattcacctttgacattcacacaggaaaagctgttgacattgatgaatgtaaagagattccaggcatttgtgcaaatggtgtgtgcattaaccagattggcagtttccgctgtgaatgccctacaggattcagttacaatgacctgctgttggtttgtgaagatatagatgagtgcagcaatggtgataatctctgccagcggaatgcagactgcatcaatagtcctggtagttaccgctgtgaatgtgccgcgggtttcaaactttcacccaatggggcctgtgtagatcgcaatgaatgtttagaaattcctaacgtttgcagtcatggcttgtgtgttgatctgcaaggaagttaccagtgcatctgccacaatggctttaaggcttctcaggaccagaccatgtgcatggatgttgatgagtgcgagcggcacccatgtggaaatggaacttgtaaaaacaccgttggatcctataactgtctgtgctacccagggtttgaactcactcataataatgattgcctggacatagatgagtgcagttccttttttggtcaggtgtgcagaaatggacgttgttttaatgaaattggttctttcaagtgtctatgtaacgaaggttatgaacttaccccagatggcaaaaactgtatagacactaatgagtgtgtcgcccttcccggctcttgctctcctggtacctgtcagaatttggagggatccttcagatgcatctgtcccccagggtatgaagtaaaaagcgagaactgcattgatataaatgaatgtgatgaagatcccaacatttgtctttttggttcctgtactaatactccagggggcttccagtgcctctgcccccctggctttgtactatctgataatggacggagatgctttgatactcgccagagcttctgcttcacaaattttgaaaatggaaagtgttctgtacccaaagctttcaacaccacaaaagcaaaatgctgctgtagtaagatgccaggagagggctggggggacccctgtgagctgtgccccaaagacgatgaagttgcatttcaggatttgtgtccatatggccatggaactgtccctagtcttcatgatacacgtgaagatgtcaatgagtgtcttgagagcccaggcatttgttcaaatggtcaatgtatcaacaccgacggatcttttcgctgtgaatgtccaatgggctacaaccttgactacactggagtacgctgtgtggatactgatgagtgttcaatcggcaatccgtgtggaaatggtacatgcaccaatgttattgggagttttgaatgcaattgcaatgaaggctttgagccagggcccatgatgaattgtgaagatatcaacgaatgtgcccagaacccactgctgtgtgctttacgctgcatgaacacttttgggtcctatgaatgcacgtgcccgattggctatgccctcagggaagatcaaaagatgtgcaaagatctggatgaatgtgctgaagggttacacgactgtgaatctaggggcatgatgtgtaagaatctaatcggcaccttcatgtgcatctgccctcctggaatggcccgaaggcccgatggagaaggctgtgtagatgaaaatgaatgcaggaccaagccaggaatctgtgaaaatggacgttgtgttaacattattggaagctatagatgtgagtgtaatgaaggattccagtcaagttcttcaggcactgaatgccttgacaatcgacagggtctctgctttgcagaggtactgcagacaatatgtcaaatggcatccagtagtcgcaatctcgtcactaagtcagaatgctgctgtgatggtgggcgaggctggggccaccagtgcgagctttgcccacttcctggaactgcccagtacaaaaagatatgtcctcatggcccaggatatacaactgatggaagagatattgatgaatgtaaggtaatgccaaacctctgcaccaatggtcagtgcatcaataccatgggctcattccgatgcttctgcaaggttggctacaccacagacatcagtggaacctcttgtatagaccttgatgaatgctcccagtccccgaaaccatgcaactacatctgcaagaacactgaggggagttatcagtgttcatgtccgagggggtatgtcctgcaagaggatggaaagacatgcaaagaccttgatgaatgtcaaacaaagcagcataactgccagttcctctgtgtcaacaccctgggggggtttacctgtaaatgtccacctggtttcacacagcatcacactgcttgtatcgacaacaacgaatgtgggtctcaacctttgctttgtggaggaaagggaatctgtcaaaacactccaggcagtttcagctgtgaatgccaaagagggttctctcttgatgccaccggactgaactgtgaagatgttgatgaatgtgatgggaaccacaggtgccaacacggctgccagaacatcctgggtggctacagatgtggctgcccccaaggctacatccagcactaccagtggaatcagtgtgtcgatgagaatgaatgctccaatcccaatgcctgtggctctgcttcctgctacaacaccctggggagttacaagtgcgcctgcccctcggggttctccttcgaccagttctccagtgcctgccacgacgtgaatgagtgctcgtcctccaagaacccctgcaattacggctgctctaacacggaggggggctacctctgtggctgcccccctgggtattacagagtgggacaaggccactgtgtctcaggaatgggatttaacaaggggcagtacctgtcactggatacagaggtcgatgaggaaaatgctctgtccccagaagcatgctacgagtgcaaaatcaacggctatcctaagaaagacagcaggcagaagagaagtattcatgaacctgatcccactgctgttgaacagatcagcctagagagtgtcgacatggacagccccgtcaacatgaagttcaacctctcccacctcggctctaaggagcacatcctggaactaaggcccgccatccagcccctcaacaaccacatccgttatgtcatctctcaagggaacgatgacagcgtcttccgcatccaccaaaggaatgggctcagctacttgcacacggccaagaagaagctcatgcccggcacatacacactggaaatcactagcatccctctctacaagaagaaggagcttaagaaactggaagagagcaatgaggatgactacctcctaggggagcttggggaggctctcagaatgaggctgcagattcagctctattaaccgttcacagacttgggcccaggctcaaatcctagcacagccagtctgcagaagcatttgaaaagtcaaggactaattttaaagaggaaaaataataataactcttgtttctttcctccctgtcttagactttgaatgttgaccctcacagggagggataatttagactctggtatggccaaagatttgagctcaaaggcaaccgtggttactgtattttttatataacttcattttaaaatatattaaaagaaacctaaatgttcaagatatcagcatatggcactaaatgcacaaaaataatgtgagcttttttttttttttcctgttagcagtctgtaacactttgggtattttgctatagttgctaattaaaaaaatatagatgtttatttatttttaatgcagtaatatatggagaaatgaacaaactatgtaaacaaaaagggaaactcacttgtttttctttagatttataaatttgagctattttttttagaggtgctttttaaaaatccaatagatacaagagatgtttcctttggttttctgccagtcatccagctgatacacacctgatcgattttaaagaaagccacacagagctgaatcgggcagtgctaatcaataatttaaaagacatgaatgtcattagatcctttataacgtagatcgaagccaaagcagctcatttgtgacaacatttcatatcaccagacacaccaggcaacagaagttgaagcacaaccactgtagcaaaataccttgactgcttgtgagaccattagcattgcaggccaaaccgtactgtatttccttctcataacctcaaggaaccatatgtgctacccacaacacctcattcttacccagggtgcgctgcgtcctcatggtactgtaggcagctgaagaaccgccgttcccttgaaagggaacacctggcattctgtggtgtttcgtgctgtcttaaataatggtgcatttattatgttcaagttatttcaggattgccatatgtgcaaacaaatcatgcaatgcagccaaggaatatatgttgttgttgttgttttaaacccattttttttttagaattttcattaatactgtagttatacaccatatgcctcattttatcatagcctattgtgtatgaaagatgtttgtacaatgaattgatgtttagtttgctttagtcatttaaaaagatattgtaccaggatgtgctattaagagcacgtatccattattcttctcaacccaagaacctgtttcctggaccagtgaccaaacctcatatgtgaaatggccaaagcacatgcaggctcctggttgttcctctcaaacctgtgctgaccaaagattagtaaccagttatacccagtattttgaggttttattgtttttttaataactaaaaaaaaactcgtgccgaattc

SEQ ID NO: 3730 - DNA, 1686 bp, Homo sapiens
ccacgcgtccgggcgtaagccaggcgtgttaaagccggtcggaactgctccggagggcacgggctccgtaggcaccaactgcaaggacccctccccctgcgggcgctcccatggcacagttcgcgttcgagagtgacctgcactcgctgcttcagctggatgcacccatccccaatgcaccccctgcgcgctggcagcgcaaagccaaggaagccgcaggcccggccccctcacccatgcgggccgccaaccgatcccacagcgccggcaggactccgggccgaactcctggcaaatccagttccaaggttcagaccactcctagcaaacctggcggtgaccgctatatcccccatcgcagtgctgcccagatggaggtggccagcttcctcctgagcaaggagaaccagtctgaaaacagccagacgcccaccaagaaggaacatcagaaagcctgggctttgaacctgaacggttttgatgtagaggaagccaagatccttcggctcagtggaaaaccacaaaatgcgccagagggttatcagaacagactgaaagtactctacagccaaaaggccactcctggctccagccggaagacctgccgttacattccttccctgccagaccgtatcctggatgcgcctgaaatccgaaatgactattacctgaaccttgtggattggagttctgggaatgtactggccgtggcactggacaacagtgtgtacctgtggagtgcaagctctggtgacatcctgcagcttttgcaaatggagcagcctggggaatatatatcctctgtggcctggatcaaagagggcaactacttggctgtgggcaccagcagtgctgaggtgcagctatgggatgtgcagcagcagaaacggcttcgaaatatgaccagtcactctgcccgagtgggctccctaagctggaacagctatatcctgtccagtggttcacgttctggccacatccaccaccatgatgttcgggtagcagaacaccatgtggccacactgagtggccacagccaggaagtgtgtgggctgcgctgggccccagatggacgacatttggccagtggtggtaatgataacttggtcaatgtgtggcctagtgctcctggagagggtggctgggttcctctgcagacattcacccagcatcaaggggctgtcaaggccgtagcatggtgtccctggcagtccaatgtcctggcaacaggagggggcaccagtgatcgacacattcgcatctggaatgtgtgctctggggcctgtctgagtgccgtggatgcccattcccaggtgtgctccatcctctggtctccccattacaaggagctcatctcaggccatggctttgcacagaaccagctagttatttggaagtacccaaccatggccaaggtggctgaactcaaaggtcacacatcccgggtcctgagtctgaccatgagcccagatggggccacagtggcatccgcagcagcagatgagaccctgaggctatggcgctgttttgagttggaccctgcgcggcggcgggagcgggagaaggccagtgcagccaaaagcagcctcatccaccaaggcatccgctgaagaccaacccatcacctcagttgttttttatttttctaataaagtcatgtctcccttcatgtttttttttttaaaa

SEQ ID NO: 3731 - DNA, 1017 bp, Homo sapiens
gagctcggccctggaggcggcgagaacatggtgcgcaggttcttggtgaccctccggattcggcgcgcgtgcggcccgccgcgagtgagggttttcgtggttcacatcccgcggctcacgggggagtgggcagcgccaggggcgcccgccgctgtggccctcgtgctgatgctactgaggagccagcgtctagggcagcagccgcttcctagaagaccaggtcatgatgatgggcagcgcccgagtggcggagctgctgctgctccacggcgcggagcccaactgcgccgaccccgccactctcacccgacccgtgcacgacgctgcccgggagggcttcctggacacgctggtggtgctgcaccgggccggggcgcggctggacgtgcgcgatgcctggggccgtctgcccgtggacctggctgaggagctgggccatcgcgatgtcgcacggtacctgcgcgcggctgcggggggcaccagaggcagtaaccatgcccgcatagatgccgcggaaggtccctcagacatccccgattgaaagaaccagagaggctctgagaaacctcgggaaacttagatcatcagtcaccgaaggtcctacagggccacaactgcccccgccacaacccaccccgctttcgtagttttcatttagaaaatagagcttttaaaaatgtcctgccttttaacgtagatataagccttcccccactaccgtaaatgtccatttatatcattttttatatattcttataaaaatgtaaaaaagaaaaacaccgcttctgccttttcactgtgttggagttttctggagtgagcactcacgccctaagcgcacattcatgtgggcatttcttgcgagcctcgcagcctccggaagctgtcgacttcatgacaagcattttgtgaactagggaagctcaggggggttactggcttctcttgagtcacactgctagcaaatggcagaaccaaagctcaaataaaaataaaattattttcattcattcactc

SEQ ID NO: 3732 - DNA, 2442 bp, Homo sapiens
gcgggattccgggccgggccggcctgggctgcaatcaatgcggctttgtctgggacgcccacatcccagaggccattcccgggtcggcaaatcggagcgcggcggggcgcgcgggggtgagataagcggccatgtgatcccacctgggctggaaggggaggggcgccaggtgaggcggcggccggtggggcgcgggcggccacgcggggctcctgcagcatggctgtcagcaggaaggactggtccgcgctgtccagccttgcccggcagaggactctggaggatgaggaggaacaggagcgcgagcgcaggcggcggcaccgcaacctgagctccaccacggacgatgaggctcccaggctcagccagaatggagaccggcaggcctctgcttctgagagactaccgagcgtggaagaagcagaggtgcccaagccactgcccccagcctccaaagatgaggacgaggacatccagagcatcctcagaacacggcaggagcggaggcagaggcggcaggtggtggaggctgcacaggcccccatccaggagaggctggaggcagaggaggggaggaacagcttgagccctgtgcaggccacacagaaacccctagtctccaagaaggaactggaaatcccacctcgccggagactgagtcgggaacagcggggcccctggcccctggaggaggagagcttggtgggcagggagccagaagagaggaagaaaggggttccagaaaagtccccagtcttggagaagtcctccatgccaaagaagacggcacctgaaaagagcctggtctccgataaaacctccatctctgagaaggtgctggcctcagagaagacatctctatcagagaagatagcagtgtcagagaaaagaaacagctcagagaagaagtctgttctagaaaaaaccagtgtctctgagaagtcgctggccccagggatggcactgggctcaggaaggaggctggtgtctgagaaagcttccatctttgagaaggcactggcctcagagaagagcccaactgcagatgctaagccggccccaaagagggccacagcctcagagcagcccctggcgcaggagccgccagcctctgggggaagcccagccaccaccaaggagcagagaggaagggccctccctgggaagaacctgccctctttggcaaagcagggggcttcagaccctccgactgtggcctcccgcctcccacccgtcacactccaggtgaaaatccccagcaaggaggaagaggcagatatgtcctcacccacacagcgaacctacagcagctccctcaaacgctccagccccaggaccatctcctttcggatgaaacccaagaaagaaaactcggaaacaaccctaactcgcagtgccagcatgaagctcccagacaacacagtgaagttgggagagaagctggagagataccacacggccatacggagatcagaatctgtcaagtctcggggtctgccttgcactgagttattcgtggctcctgtgggtgtagccagcaagcgccacctctttgagaaggaactggcgggccagagccgagcagaaccagcctccagccggaaggagaacttgaggctctcaggggttgtgacatcaaggctcaacctgtggatcagcaggacccaggaatctggagatcaggacccccaggaggcacagaaagcatcatctgcaaccgagaggactcagtggggacagaaatctgactcctcgctggacgctgaggtgtgacaagccccgccaagacagacctgcaagtcttcgtctcaagggacctccctcatgccaggcccctgcctctcacagcagcaccctttcctctcattgtccctgttcccttgttggctgtggatctgtttggccagggtccctggggtcaggaatatttgcaagactcagccagctccttcccagcccagcctcttggggctgggactttctcaccctgcggcaggcacaacagatgctgggacccagtctctgcccaggtcacagcacaagtgcacatcagcactatggggcctatgtcctgcccagagacctctgctccttcctgctcacatccacagtcagggcacggcgcccctcaagaactccagagtcacctgtctcatcggctcccaacaagtgcctctttgtctatgatgtcccccttctctgaggcctggacccacccatctttgtccctgggggctgctcccagccactgaggcccgctctggccaggggagaaggagctgccgtgcgtcttccctgtgccccgtctccctgcttggttctcccctcccttccctggccggctgccatggccaggagctaagtgcctttttgtgtgcaaccacttaccctttctctgaaaaacctgttctcaggaaggatctgataaactcatttactctc

SEQ ID NO: 3733 - DNA, 1648 bp, Homo sapiens
atgcgggagatcgtgcacatccaggccggccagtgcggcaaccagatcggggccaagttctgggaagtcatcagtgatgagcatggcatcgaccccagcggcaactacgtgggcgactcggacttgcagctggagcggatcagcgtctactacaacgaggcctcttctcacaagtacgtgcctcgagccattctggtggacctggaacccggaaccatggacagtgtccgctcaggggcctttggacatctcttcaggcctgacaatttcatctttggtcagagtggggccggcaacaactgggccaagggtcactacacggagggggcggagctggtggattcggtcctggatgtggtgcggaaggagtgtgaaaactgcgactgcctgcagggcttccagctgacccactcgctggggggggggacgggctccggcatgggcacgttgctcatcagcaaggtgcgtgaggagtatcccgaccgcatcatgaacaccttcagcgtcgtgccctcacccaaggtgtcagacacggtggtggaaccctacaacgccacgctgtccatccaccagctggtggaaaacacggatgaaacctactgcatcgacaacgaggcgctctacgacatctgcttccgcaccctcaagctggccacgcccacctacggggacctcaaccacctggtatcggccaccatgagcggagtcaccacctccttgcgcttcccgggccagctcaacgctgacctgcgcaagctggccgtcaacatggtgcccttcccgcgcctgcacttcttcatgcccggcttcgcccccctcaccaggcggggcagccagcagtaccgggccctgaccgtgcccgagctcacccagcagatgttcgatgccaagaacatgatggccgcctgcgacccgcgccacggccgctacctgacggtggccaccgtgttccggggccgcatgtccatgaaggaggtggacgagcagatgctggccatccagagcaagaacagcagctacttcgtggagtggatccccaacaacgtgaaggtggccgtgtgtgacatcccgccccgcggcctcaagatgtcctccaccttcatcgggaacagcacggccatccaggagctgttcaagcgcatctccgagcagttcacggccatgttccggcgcaaggccttcctgcactggtacacgggcgagggcatggacgagatggagttcaccgaggccgagagcaacatgaacgacctggtgtccgagtaccagcagtaccaggacgccacggccgaggaagagggcgagatgtacgaagacgacgaggaggagtcggaggcccagggccccaagtgaaactgctcgcagctggagtgagaggcaggtggcggccggggccgaagccagcagtgtctaaacccccggagccatcttgctgccgacaccctgctttccccatcgccctagggctcccttgccgccctcctgcagtatttatggcctcgtcctcccccacctaggccacgtgtgagctgctcctgtctctgtcttattgcagctccaggcctgacgttttacggttttgttttttactggtttgtgtttatattttcggggatacttaataaatctattgctgtcagataccctt

SEQ ID NO: 3734 - DNA, 343 bp, Homo sapiens
  misc_feature (1)..(343): n=a,t,g or c
aataaatatggtgcatcaattcaactagaactattattggaaaacaactgagtactgggctgatgattaagttattgcctctcagcttcaaccttgctttattgtgttttagctttgtgagactgtggctgacactctggaaatacacttctgttttaccagctgctccctttncggttctgccaagagggggagctagatagtgccagcaagttggaggaaaaaggaggaagggatctctttctcctggtctgtttcctgttactgactgaccccaaagcccagtgacaaattgtttacctcgctgggaaaaaacagntgttttcagtagcagcggttgctt

SEQ ID NO: 3735 - DNA, 554 bp, Homo sapiens
gccagaaccggtggagcagcgacccctgagcagtgttctctgtgctgagcggcgggactgagctgttgagttagagccaacatgagtgagcgacaaggtgctggggcaaccaatggaaaagacaagacatctggtgaaaatgatggacagaagaaagttcaagaagaatttgacattgacatggatgcaccagagacagaacgtgcagcggtggccattcagtctcagttcagaaaattccagaagaagaaggctgggtctcagtcctagtgggagaaccccctcctagtccacctgaaaacaccaaattcaaccatcatctgtcaagaaattaaaagaacaacaccctagagagaagtcatccacacacaatccacacacgcatagcaaacctccaatgcatgtacagaaacctgtgatatttatacccttgtaggaaggtatagacaatggaattgtgagtagcttaatctctatgtttctctccattttcattcctcctgcaactattttccttgatgttgtaataaaatgaagttacgatgagtgaaaaa

SEQ ID NO: 3736 - DNA, 1125 bp, Homo sapiens
gcagaaggcaagcccggaggcactttcaagaatgagcatatctcatcttcccggaggaaaaaaaaaaaagaatgggtacgtctgagaatcaaattttgaaagagtgcaatgatgggtcgtttgataatttgtcggaaaaacaatctacctgttatctagctttgggctaggccattccagttccagacgcaggctgaacgtcgtgaagcggaaggggcgggcccgcaggcgtccgtgtggtcctccgtgcagccctcggcccgagccggttcttcctggtaggaggcggaactcgaattcatttctcccgctgccccatctcttagctcgcggttgtttcattccgcagtttcttcccatgcacctgccgcgtaccggccactttgtgccgtacttacgtcatctttttcctaaatcgaggtggcatttacacacagcgccagtgcacacagcaagtgcacaggaagatgagttttggcccctaaccgctccgtgatgcctaccaagtcacagacccttttcatcgtcccagaaacgtttcatcacgtctcttcccagtcgattcccgaccccacctttattttgatctccataaccattttgcctgttggagaacttcatatagaatggaatcaggctgggcgctgtggctcacgcctgcactttgggaggccgaggcgggcggattacttgaggataggagttccagaccagcgtggccaacgtggtgaatccccgtctctactaaaaaatacaaaaattagctgggcgtggtgggtgcctgtaatcccagctattcgggagggtgaggcaggagaatcgcttgaacccgggaggcagaggttgcagtgagccaagatcgtgccactacactccagcctgggcgacaagaacgaaactccgtctcaaaaaaaaggggggaatcatacattatgtgctcatttttgtcgggcttctgtccttcaatgtactgtctgacattcgttcatgttgtatatatcagtattttgctccttttcatttagtatagtccatcgattgtatatccgtccttttgatggccttttgagttgtttcccatttgcggttatgaaataaagctgctataaacaaaaaaaaaaaaaa

SEQ ID NO: 3737 - DNA, 2740 bp, Homo sapiens; identical to SEQ ID NO: 3104

SEQ ID NO: 3738 - DNA, 2148 bp, Homo sapiens
gcttcagggtacagctcccccgcagccagaagccgggcctgcagcccctcagcaccgctccgggacaccccacccgcttcccaggcgtgacctgtcaacagcaacttcgcggtgtggtgaactctctgaggaaaaaccattttgattattactctcagacgtgcgtggcaacaagtgactgagacctagaaatccaagcgttggaggtcctgaggccagcctaagtcgcttcaaaatggaacgaaggcgtttgtggggttccattcagagccgatacatcagcatgagtgtgtggacaagcccacggagacttgtggagctggcagggcagagcctgctgaaggatgaggccctggccattgccgccctggagttgctgcccagggagctcttcccgccactcttcatggcagcctttgacgggagacacagccagaccctgaaggcaatggtgcaggcctggcccttcacctgcctccctctgggagtgctgatgaagggacaacatcttcacctggagaccttcaaagctgtgcttgatggacttgatgtgctccttgcccaggaggttcgccccaggaggtggaaacttcaagtgctggatttacggaagaactctcatcaggacttctggactgtatggtctggaaacagggccagtctgtactcatttccagagccagaagcagctcagcccatgacaaagaagcgaaaagtagatggtttgagcacagaggcagagcagcccttcattccagtagaggtgctcgtagacctgttcctcaaggaaggtgcctgtgatgaattgttctcctacctcattgagaaagtgaagcgaaagaaaaatgtactacgcctgtgctgtaagaagctgaagatttttgcaatgcccatgcaggatatcaagatgatcctgaaaatggtgcagctggactctattgaagatttggaagtgacttgtacctggaagctacccaccttggcgaaattttctccttacctgggccagatgattaatctgcgtagactcctcctctcccacatccatgcatcttcctacatttccccggagaaggaagagcagtatatcgcccagttcacctctcagttcctcagtctgcagtgcctgcaggctctctatgtggactctttatttttccttagaggccgcctggatcagttgctcaggcacgtgatgaaccccttggaaaccctctcaataactaactgccggctttcggaaggggatgtgatgcatctgtcccagagtcccagcgtcagtcagctaagtgtcctgagtctaagtggggtcatgctgaccgatgtaagtcccgagcccctccaagctctgctggagagagcctctgccaccctccaggacctggtctttgatgagtgtgggatcacggatgatcagctccttgccctcctgccttccctgagccactgctcccagcttacaaccttaagcttctacgggaattccatctccatatctgccttgcagagtctcctgcagcacctcatcgggctgagcaatctgacccacgtgctgtatcctgtccccctggagagttatgaggacatccatggtaccctccacctggagaggcttgcctatctgcatgccaggctcagggagttgctgtgtgagttggggcggcccagcatggtctggcttagtgccaacccctgtcctcactgtggggacagaaccttctatgacccggagcccatcctgtgcccctgtttcatgcctaactagctgggtgcacatatcaaatgcttcattctgcatacttggacactaaagccaggatgtgcatgcatcttgaagcaacaaagcagccacagtttcagacaaatgttcagtgtgagtgaggaaaacatgttcagtgaggaaaaaacattcagacaaatgttcagtgaggaaaaaaaggggaagttggggataggcagatgttgacttgaggagttaatgtgatctttggggagatacatcttatagagttagaaatagaatctgaatttctaaagggagattctggcttgggaagtacatgtaggagttaatccctgtgtagactgttgtaaagaaactgttgaaaataaagagaagcaatgtgaagcaaaaaaaaaaaaaaaaaa

SEQ ID NO: 3739 - DNA, 3492 bp, Homo sapiens; identical to SEQ ID NO: 3105

SEQ ID NO: 3740 - DNA, 2653 bp, Homo sapiens
gagcgcggctggagtttgctgctgccgctgtgcagtttgttcaggggcttgtggcggtgagtccgagaggctgcgtgtgagagacgtgagaaggatcctgcactgaggaggtggaaagaagaggattgctcgaggaggcctggggtctgtgagacagcggagctgggtgaaggctgcgggttccggcgaggcctgagctgtgctgtcgtcatgcctcaaacccgatcccaggcacaggctacaatcagttttccaaaaaggaagctgtctcgggcattgaacaaagctaaaaactccagtgatgccaaactagaaccaacaaatgtccaaaccgtaacctgttctcctcgtgtaaaagccctgcctctcagccccaggaaacgtctgggcgatgacaacctatgcaacactccccatttacctccttgttctccaccaaagcaaggcaagaaagagaatggtccccctcactcacatacacttaagggacgaagattggtatttgacaatcagctgacaattaagtctcctagcaaaagagaactagccaaagttcaccaaaacaaaatactttcttcagttagaaaaagtcaagagatcacaacaaattctgagcagagatgtccactgaagaaagaatctgcatgtgtgagactattcaagcaagaaggcacttgctaccagcaagcaaagctggtcctgaacacagctgtcccagatcggctgcctgccagggaaagggagatggatgtcatcaggaatttcttgagggaacacatctgtgggaaaaaagctggaagcctttacctttctggtgctcctggaactggaaaaactgcctgcttaagccggattctgcaagacctcaagaaggaactgaaaggctttaaaactatcatgctgaattgcatgtccttgaggactgcccaggctgtattcccagctattgctcaggagatttgtcaggaagaggtatccaggccagctgggaaggacatgatgaggaaattggaaaaacatatgactgcagagaagggccccatgattgtgttggtattggacgagatggatcaactggacagcaaaggccaggatgtattgtacacgctatttgaatggccatggctaagcaattctcacttggtgctgattggtattgctaataccctggatctcacagatagaattctacctaggcttcaagctagagaaaaatgtaagccacagctgttgaacttcccaccttataccagaaatcagatagtcactattttgcaagatcgacttaatcaggtatctagagatcaggttctggacaatgctgcagttcaattctgtgcccgcaaagtctctgctgtttcaggagatgttcgcaaagcactggatgtttgcaggagagctattgaaattgtagagtcagatgtcaaaagccagactattctcaaaccactgtctgaatgtaaatcaccttctgagcctctgattcccaagagggttggtcttattcacatatcccaagtcatctcagaagttgatggtaacaggatgaccttgagccaagagggagcacaagattccttccctcttcagcagaagatcttggtttgctctttgatgctcttgatcaggcagttgaaaatcaaagaggtcactctggggaagttatatgaagcctacagtaaagtctgtcgcaaacagcaggtggcggctgtggaccagtcagagtgtttgtcactttcagggctcttggaagccaggggcattttaggattaaagagaaacaaggaaacccgtttgacaaaggtgtttttcaagattgaagagaaagaaatagaacatgctctgaaagataaagctttaattggaaatatcttagctactggattgccttaaattcttctcttacaccccacccgaaagtattcagctggcatttagagagctacagtcttcattttagtgctttacacattcgggcctgaaaacaaatatgaccttttttacttgaagccaatgaattttaatctatagattctttaatattagcacagaataatatctttgggtcttactatttttacccataaaagtgaccaggtagaccctttttaattacattcactacttctaccacttgtgtatctctagccaatgtgcttgcaagtgtacagatctgtgtagaggaatgtgtgtatatttacctcttcgtttgctcaaacatgagtgggtatttttttgtttgttttttttgttgttgttgtttttgaggcgcgtctcaccctgttgcccaggctggagtgcaatggcgcgttctctgctcactacagcacccgcttcccaggttgaagtgattctcttgcctcagcctcccgagtagctgggattacaggtgcccaccaccgcgcccagctaattttttaatttttagtagagacagggttttaccatgttggccaggctggtcttgaactcctgaccctcaagtgatctgcccaccttggcctccctaagtgctgggattataggcgtgagccaccatgctcagccattaaggtattttgttaagaactttaagtttagggtaagaagaatgaaaatgatccagaaaaatgcaagcaagtccacatggagatttggaggacactggttaaag

SEQ ID NO: 3741 - DNA, 756 bp, Homo sapiens
cggacttggcttgttagaaggctgaaagatgatggcaggaatgaaaatccagcttgtatgcatgctactcctggctttcagctcctggagtctgtgctcagattcagaagaggaaatgaaagcattagaagcagatttcttgaccaatatgcatacatcaaagattagtaaagcacatgttccctcttggaagatgactctgctaaatgtttgcagtcttgtaaataatttgaacagcccagctgaggaaacaggagaagttcatgaagaggagcttgttgcaagaaggaaacttcctactgctttagatggctttagcttggaagcaatgttgacaatataccagctccacaaaatctgtcacagcagggcttttcaacactgggagttaatccaggaagatattcttgatactggaaatgacaaaaatggaaaggaagaagtcataaagagaaaaattccttatattctgaaacggcagctgtatgagaataaacccagaagaccctacatactcaaaagagattcttactattactgagagaataaatcatttatttacatgtgattgtgattcatcatcccttaattaaatatcaaattatatttgtgtgaaaatgtgacaaacacacttatctgtctcttctacaattgtggtttattgaatgtgtttttctgcactaatagaaattagactaagtgttttcaaataaatctaaatcttcaaaaaaaaaaaaaaaaaatggggccgcaatt

SEQ ID NO: 3742 - DNA, 4181 bp, Homo sapiens
  misc_feature (1)..(4181): n=a,t,g or c
ggtggatgcgtttgggttgtagctaggctttttcttttctttctcttttaaaacacatctagacaaggaaaaaacaagcctcggatctgatttttcactcctcgttcttgtgcttggttcttactgtgtttgtgtattttaaaggcgagaagacgaggggaacaaaaccagctggatccatccatcaccgtgggtggttttaatttttcgttttttctcgttatttttttttaaacaaccactcttcacaatgaacaaactgtatatcggaaacctcagcgagaacgccgccccctcggacctagaaagtatcttcaaggacgccaagatcccggtgtcgggacccttcctggtgaagactggctacgcgttcgtggactgcccggacgagagctgggccctcaaggccatcgaggcgctttcaggtaaaatagaactgcacgggaaacccatagaagttgagcactcggtcccaaaaaggcaaaggattcggaaacttcagatacgaaatatcccgcctcatttacagtgggaggtgctggatagtttactagtccagtatggagtggtggagagctgtgagcaagtgaacactgactcggaaactgcagttgtaaatgtaacctattccagtaaggaccaagctagacaagcactagacaaactgaatggatttcagttagagaatttcaccttgaaagtagcctatatccctgatgaaatggccgcccagcaaaaccccttgcagcagccccgaggtcgccgggggcttgggcagaggggctcctcaaggcaggggtctccaggatccgtatccaagcagaaaccatgtgatttgcctctgcgcctgctggttcccacccaatttgttggagccatcataggaaaagaaggtgccaccattcggaacatcaccaaacagacccagtctaaaatcgatgtccaccgtaaagaaaatgcgggggctgctgagaagtcgattactatcctctctactcctgaaggcacctctgcggcttgtaagtctattctggagattatgcataaggaagctcaagatataaaattcacagaagagatccccttgaagattttagctcataataactttgttggacgtcttattggtaaagaaggaagaaatcttaaaaaaattgagcaagacacagacactaaaatcacgatatctccattgcaggaattgacgctgtataatccagaacgcactattacagttaaaggcaatgttgagacatgtgccaaagctgaggaggagatcatgaagaaaatcagggagtcttatgaaaatgatattgcttctatgaatcttcaagcacatttaattcctggattaaatctgaacgccttgggtctgttcccacccacttcagggatgccacctcccacctcagggcccccttcagccatgactcctccctacccgcagtttgagcaatcagaaacggagactgttcatcagtttatcccagctctatcagtcggtgccatcatcggcaagcagggccagcacatcaagcagctttctcgctttgctggagcttcaattaagattgctccagcggaagcaccagatgctaaagtgaggatggtgattatcactggaccaccagaggctcagttcaaggctcagggaagaatttatggaaaaattaaagaagaaaactttgttagtcctaaagaagaggtgaaacttgaagctcatatcagagtgccatcctttgctgctggcagagttattggaaaaggaggcaaaacggtgaatgaacttcagaatttgtcaagtgcagaagttgttgtccctcgtgaccagacacctgatgagaatgaccaagtggttgtcaaaataactggtcacttctatgcttgccaggttgcccagagaaaaattcaggaaattctgactcaggtaaagcagcaccaacaacagaaggctctgcaaagtggaccacctcagtcaagacggaagtaaaggctcaggaaacagcccaccacagaggcagatgccaaaccaaagacagattgcttaaccaacagatgggcgctgaccccctatccagaatcacatgcacaagtttttacctagccagttgtttctgaggaccaggcaacttttgaactcctgtctctgtgagaatgtatactttatgctctctgaaatgtatgacacccagctttaaaacaaacaaacaaacaaacaaaaaaagggtgggggagggagggaaagagaagagctctgcacttccctttgttgtagtctcacagtataacagatattctaattcttcttaatattcccccataatgccagaaattggcttaatgatgctttcactaaattcatcaaatagattgctcctaaatccaattgttaaaattggatcagaataattatcacaggaacttaaatgttaagccattagcatagaaaaactgttctcagttttatttttacctaacactaacatgagtaacctaagggaagtgctgaatggtgttggcaggggtattaaacgtgcatttttactcaactacctcaggtattcagtaatacaatgaaaagcaaaattgttccttttttttgaaaattttatatactttataatgatagaagtccaaccgttttttaaaaaataaatttaaaatttaacagcaatcagctaacaggcaaattaagatttttacttctggctggtgacagtaaagctggaaaattaatttcagggttttttgaggcttttgacacagttattagttaaatcaaatgttcaaaaatacggagcagtgcctagtatctggagagcagcactaccatttattctttcatttatagttgggaaagtttttgacggtactaacaaagtggtcgcaggagattttggaacggctggtttaaatggcttcaggagacttcagttttttgtttagctacatgattgaatgcataataaatgctttgtgcttctgactatcaatacctaaagaaagtgcatcagtgaagagatgcaagactttcaactgactggcaaaaagcaagctttagcttgtcttataggatgcttagtttgccactacacttcagaccaatgggacagtcatagatggtgtgacagtgtttaaacgcaacaaaaggctacatttccatggggccagcactgtcatgagcctcactaagctattttgaagatttttaagcactgataaattaaaaaaaaaaaaaaaaaattagactccaccttaagtagtaaagtataacaggatttctgtatactgtgcaatcagttctttgaaaaaaaagtcaaaagatagagaatacaagaaaagttttngggatataatttgaatgactgtgaaaacatatgacctttgataacgaactcatttgctcactccttgacagcaaagcccagtacgtacaattgtgttgggtgtgggtggtctccaaggccacgctgctctctgaattgattttttgagttttggnttgnaagatgatcacagncatgttacactgatcttnaaggacatatnttataaccctttaaaaaaaaaatcccctgcctcattcttatttcgagatgaatttcgatacagactagatgtctttctgaagatcaattagacattntgaaaatgatttaaagtgttttccttaatgttctctgaaaacaagtttcttttgtagttttaaccaaaaaagtgccctttttgtcactggtttctcctagcattcatgatttttttttcacacaatgaattaaaattgctaaaatcatggactggctttctggttggatttcaggtaagatgtgtttaaggccagagcttttctcagtatttgatttttttccccaatatttgattttttaaaaatatacacataggagctgcatttaaaacctgctggtttaaattctgtcanatttcacttctagccttttagtatggcnaatcanaatttacttttacttaagcatttgtaatttggagtatctggtactagctaagaaataattcnataattgagttttgtactcnccaaanatgggtcattcctcatgnataatgtncccccaatgcagcttcattttccaganaccttgacgcaggataaattttttcatcatttaggtccccaaaaaaaaaaaaaaaaaaaaaaaaaa

SEQ ID NO: 3743 - DNA, 1014 bp, Homo sapiens
gcagaaatagcctagggagatcaaccccgagatgctgaacaaagtgctgtcccggctgggggtcgccggccagtggcgcttcgtggacgtgctggggctggaagaggagtctctgggctcggtgccagcgcctgcctgcgcgctgctgctgctgtttcccctcacggcccagcatgagaacttcaggaaaaagcagattgaagagctgaagggacaagaagttagtcctaaagtgtacttcatgaagcagaccattgggaattcctgtggcacaatcggacttattcacgcagtggccaataatcaagacaaactgggatttgaggatggatcagttctgaaacagtttctttctgaaacagagaaaatgtcccctgaagacagagcaaaatgctttgaaaagaatgaggccatacaggcagcccatgatgccgtggcacaggaaggccaatgtcgggtagatgacaaggtgaatttccattttattctgtttaacaacgtggatggccacctctatgaacttgatggacgaatgccttttccggtgaaccatggcgccagttcagaggacaccctgctgaaggacgctgccaaggtgtgcagagaattcaccgagcgtgagcaaggagaagtccgcttctctgccgtggctctctgcaaggcagcctaatgctctgtgggagggactttgctgatttcccctcttcccttcaacatgaaaatatataccccccatgcagtctaaaatgcttcagtacttgtgaaacacagctgttcttctgttctgcagacacgccttcccctcagccacacccaggcacttaagcacaagcagagtgcacagctgtccactgggccattgtggtgtgagcttcagatggtgaagcattctccccagtgtatgtcttgtatccgatatctaacgctttaaatggctactttggtttctgtctgtaagttaagaccttggatgtggttatgttgtcctaaagaataaattttgctgatagtagc

SEQ ID NO: 3744 - DNA, 1801 bp, Homo sapiens
gcaaggcatagagacaacatagagctaagtaaagccagtggaaatgaagagtcttccaatcctactgttgctgtgcgtggcagtttgctcagcctatccattggatggagctgcaaggggtgaggacaccagcatgaaccttgttcagaaatatctagaaaactactacgacctcaaaaaagatgtgaaacagtttgttaggagaaaggacagtggtcctgttgttaaaaaaatccgagaaatgcagaagttccttggattggaggtgacggggaagctggactccgacactctggaggtgatgcgcaagcccaggtgtggagttcctgatgttggtcacttcagaacctttcctggcatcccgaagtggaggaaaacccaccttacatacaggattgtgaattatacaccagatttgccaaaagatgctgttgattctgctgttgagaaagctctgaaagtctgggaagaggtgactccactcacattctccaggctgtatgaaggagaggctgatataatgatctcttttgcagttagagaacatggagacttttacccttttgatggacctggaaatgttttggcccatgcctatgcccctgggccagggattaatggagatgcccactttgatgatgatgaacaatggacaaaggatacaacagggaccaatttatttctcgttgctgctcatgaaattggccactccctgggtctctttcactcagccaacactgaagctttgatgtacccactctatcactcactcacagacctgactcggttccgcctgtctcaagatgatataaatggcattcagtccctctatggacctccccctgactcccctgagacccccctggtacccacggaacctgtccctccagaacctgggacgccagccaactgtgatcctgctttgtcctttgatgctgtcagcactctgaggggagaaatcctgatctttaaagacaggcacttttggcgcaaatccctcaggaagcttgaacctgaattgcatttgatctcttcattttggccatctcttccttcaggcgtggatgccgcatatgaagttactagcaaggacctcgttttcatttttaaaggaaatcaattctgggccatcagaggaaatgaggtacgagctggatacccaagaggcatccacaccctaggtttccctccaaccgtgaggaaaatcgatgcagccatttctgataaggaaaagaacaaaacatatttctttgtagaggacaaatactggagatttgatgagaagagaaattccatggagccaggctttcccaagcaaatagctgaagactttccagggattgactcaaagattgatgctgtttttgaagaatttgggttcttttatttctttactggatcttcacagttggagtttgacccaaatgcaaagaaagtgacacacactttgaagagtaacagctggcttaattgttgaaagagatatgtagaaggcacaatatgggcactttaaatgaagctaataattcttcacctaagtctctgtgaattgaaatgttcgttttctcctgcctgtgctgtgactcgagtcacactcaagggaacttgagcgtgaatctgtatcttgccggtcatttttatgttattacagggcattcaaatgggctgctgcttagcttgcaccttgtcacatagagtgatctttcccaagagaaggggaagcactcgtgtgcaacagacaagtgactgtatctgtgtagactatttgcttatttaataaagacgatttgtcagttgtttt

SEQ ID NO: 3745 - DNA, 1050 bp, Homo sapiens; identical to SEQ ID NO: 3111

SEQ ID NO: 3746 - DNA, 2627 bp, Homo sapiens; identical to SEQ ID NO: 3112

SEQ ID NO: 3747 - DNA, 3020 bp, Homo sapiens
gttcaaggcagcgcccacacccgggggctctccgcaacccgaccgcctgtccgctcccccacttcccgccctccctcccacctactcattcacccacccacccacccagagccgggacggcagcccaggcgcccgggccccgccgtctcctcgccgcgatcctggacttcctcttgctgcaggacccggcttccacgtgtgtcccggagccggcgtctcagcacacgctccgctccgggcctgggtgcctacagcagccagagcagcagggagtccgggacccgggcggcatctgggccaagttaggcgccgccgaggccagcgctgaacgtctccagggccggaggagccgcggggcgtccgggtctgagcctcagcaaatgggctccgacgtgcgggacctgaacgcgctgctgcccgccgtcccctccctgggtggcggcggcggctgtgccctgcctgtgagcggcgcggcgcagtgggcgccggtgctggactttgcgcccccgggcgcttcggcttacgggtcgttgggcggccccgcgccgccaccggctccgccgccacccccgccgccgccgcctcactccttcatcaaacaggagccgagctggggcggcgcggagccgcacgaggagcagtgcctgagcgccttcactgtccacttttccggccagttcactggcacagccggagcctgtcgctacgggcccttcggtcctcctccgcccagccaggcgtcatccggccaggccaggatgtttcctaacgcgccctacctgcccagctgcctcgagagccagcccgctattcgcaatcagggttacagcacggtcaccttcgacgggacgcccagctacggtcacacgccctcgcaccatgcggcgcagttccccaaccactcattcaagcatgaggatcccatgggccagcagggctcgctgggtgagcagcagtactcggtgccgcccccggtctatggctgccacacccccaccgacagctgcaccggcagccaggctttgctgctgaggacgccctacagcagtgacaatttataccaaatgacatcccagcttgaatgcatgacctggaatcagatgaacttaggagccaccttaaagggagttgctgctgggagctccagctcagtgaaatggacagaagggcagagcaaccacagcacagggtacgagagcgataaccacacaacgcccatcctctgcggagcccaatacagaatacacacgcacggtgtcttcagaggcattcaggatgtgcgacgtgtgcctggagtagccccgactcttgtacggtcggcatctgagaccagtgagaaacgccccttcatgtgtgcttacccaggctgcaataagagatattttaagctgtcccacttacagatgcacagcaggaagcacactggtgagaaaccataccagtgtgacttcaaggactgtgaacgaaggttttctcgttcagaccagctcaaaagacaccaaaggagacatacaggtgtgaaaccattccagtgtaaaacttgtcagcgaaagttctcccggtccgaccacctgaagacccacaccaggactcatacaggtaaaacaagtgaaaagcccttcagctgtcggtggccaagttgtcagaaaaagtttgcccggtcagatgaattagtccgccatcacaacatgcatcagagaaacatgaccaaactccagctggcgctttgaggggtctccctcggggaccgttcagtgtcccaggcagcacagtgtgtgaactgctttcaagtctgactctccactcctcctcactaaaaaggaaacttcagttgatcttcttcatccaacttccaagacaagataccggtgcttctggaaactaccaggtgtgcctggaagagttggtctctgccctgcctacttttagttgactcacaggccctggagaagcagctaacaatgtctggttagttaaaagcccattgccatttggtctggattttctactgtaagaagagccatagctgatcatgtccccctgacccttcccttctttttttatgctcgttttcgctggggatggaattattgtaccattttctatcatggaatatttataggccagggcatgtgtatgtgtctgctaatgtaaactttgtcatggtttccatttactaacagcaacagcaagaaataaatcagagagcaaggcatcgggggtgaatcttgtctaacattcccgaggtcagccaggctgctaacctggaaagcaggatgtagttctgccaggcaacttttaaagctcatgcatttcaagcagctgaagaaagaatcagaactaaccagtacctctgtatagaaatctaaaagaattttaccattcagttaattcaatgtgaacactggcacactgctcttaagaaactatgaagatctgagatttttttgtgtatgtttttgactcttttgagtggtaatcatatgtgtctttatagatgtacatacctccttgcacaaatggaggggaattcattttcatcactgggactgtccttagtgtataaaaaccatgctggtatatggcttcaagttgtaaaaatgaaagtgactttaaaagaaaataggggatggtccaggatctccactgataagactgtttttaagtaacttaaggacctttgggtctacaagtatatgtgaaaaaaatgagacttactgggtgaggaaatccattgtttaaagatggtcgtgtgtgtgtgtgtgtgtgtgtgtgtgttgtgttgtgttttgttttttaagggagggaatttattatttaccgttgcttgaaattactgtgtaaatatatgtctgataatgatttgctctttgacaactaaaattaggactgtataagtactagatgcatcactgggtgttgatcttacaagatattgatgataacacttaaaattgtaacctgcatttttcactttgctctcaattaaagtctattcaaaaggaaaaaaaaaaaaaaaa

SEQ ID NO: 3748 - DNA, 5994 bp, Homo sapiens
gcgctgcccgcctcgtccccaccccccaaccccccgcgcccgccctcggacagtccctgctcgcccgcgcgctgcagccccatctcctagcggcagcccaggcgcggagggagcgagtccgccccgaggtaggtccaggacgggcgcacagcagcagccgaggctggccgggagagggaggaagaggatggcagggccacgccccagcccatgggccaggctgctcctggcagccttgatcagcgtcagcctctctgggaccttggcaaaccgctgcaagaaggccccagtgaagagctgcacggagtgtgtccgtgtggataaggactgcgcctactgcacagacgagatgttcagggaccggcgctgcaacacccaggcggagctgctggccgcgggctgccagcgggagagcatcgtggtcatggagagcagcttccaaatcacagaggagacccagattgacaccaccctgcggcgcagccagatgtccccccaaggcctgcgggtccgtctgcggcccggtgaggagcggcattttgagctggaggtgtttgagccactggagagccccgtggacctgtacatcctcatggacttctccaactccatgtccgatgatctggacaacctcaagaagatggggcagaacctggctcgggtcctgagccagctcaccagcgactacactattggatttggcaagtttgtggacaaagtcagcgtcccgcagacggacatgaggcctgagaagctgaaggagccctggcccaacagtgacccccccttctccttcaagaacgtcatcagcctgacagaagatgtggatgagttccggaataaactgcagggagagcggatctcaggcaacctggatgctcctgagggcggcttcgatgccatcctgcagacagctgtgtgcacgagggacattggctggcgcccggacagcacccacctgctggtcttctccaccgagtcagccttccactatgaggctgatggcgccaacgtgctggctggcatcatgagccgcaacgatgaacggtgccacctggacaccacgggcacctacacccagtacaggacacaggactacccgtcggtgcccaccctggtgcgcctgctcgccaagcacaacatcatccccatctttgctgtcaccaactactcctatagctactacgagaagcttcacacctatttccctgtctcctcactgggggtgctgcaggaggactcgtccaacatcgtggagctgctggaggaggccttcaatcggatccgctccaacctggacatccgggccctagacagcccccgaggccttcggacagaggtcacctccaagatgttccagaagacgaggactgggtcctttcacatccggcggggggaagtgggtatataccaggtgcagctgcgggcccttgagcacgtggatgggacgcacgtgtgccagctgccggaggaccagaagggcaacatccatctgaaaccttccttctccgacggcctcaagatggacgcgggcatcatctgtgatgtgtgcacctgcgagctgcaaaaagaggtgcggtcagctcgctgcagcttcaacggagacttcgtgtgcggacagtgtgtgtgcagcgagggctggagtggccagacctgcaactgctccaccggctctctgagtgacattcagccctgcctgcgggagggcgaggacaagccgtgctccggccgtggggagtgccagtgcgggcactgtgtgtgctacggcgaaggccgctacgagggtcagttctgcgagtatgacaacttccagtgtccccgcacttccgggttcctgtgcaatgaccgaggacgctgctccatgggccagtgtgtgtgtgagcctggttggacaggcccaagctgtgactgtcccctcagcaatgccacctgcatcgacagcaatgggggcatctgtaatggacgtggccactgtgagtgtggccgctgccactgccaccagcagtcgctctacacggacaccatctgcgagatcaactactcggcgatccacccgggcctctgcgaggacctacgctcctgcgtgcagtgccaggcgtggggcaccggcgagaagaaggggcgcacgtgtgaggaatgcaacttcaaggtcaagatggtggacgagcttaagagagccgaggaggtggtggtgcgctgctccttccgggacgaggatgacgactgcacctacagctacaccatggaaggtgacggcgcccctgggcccaacagcactgtcctggtgcacaagaagaaggactgccctccgggctccttctggtggctcatccccctgctcctcctcctcctgccgctcctggccctgctactgctgctatgctggaagtactgtgcctgctgcaaggcctgcctggcacttctcccgtgctgcaaccgaggtcacatggtgggctttaaggaagaccactacatgctgcgggagaacctgatggcctctgaccacttggacacgcccatgctgcgcagcgggaacctcaagggccgtgacgtggtccgctggaaggtcaccaacaacatgcagcggcctggctttgccactcatgccgccagcatcaaccccacagagctggtgccctacgggctgtccttgcgcctggcccgcctttgcaccgagaacctgctgaagcctgacactcgggagtgcgcccagctgcgccaggaggtggaggagaacctgaacgaggtctacaggcagatctccggtgtacacaagctccagcagaccaagttccggcagcagcccaatgccgggaaaaagcaagaccacaccattgtggacacagtgctgatggcgccccgctcggccaagccggccctgctgaagcttacagagaagcaggtggaacagagggccttccacgacctcaaggtggcccccggctactacaccctcactgcagaccaggacgcccggggcatggtggagttccaggagggcgtggagctggtggacgtacgggtgcccctctttatccggcctgaggatgacgacgagaagcagctgctggtggaggccatcgacgtgcccgcaggcactgccaccctcggccgccgcctggtaaacatcaccatcatcaaggagcaagccagagacgtggtgtcctttgagcagcctgagttctcggtcagccgcggggaccaggtggcccgcatccctgtcatccggcgtgtcctggacggcgggaagtcccaggtctcctaccgcacacaggatggcaccgcgcagggcaaccgggactacatccccgtggagggtgagctgctgttccagcctggggaggcctggaaagagctgcaggtgaagctcctggagctgcaagaagttgactccctcctgcggggccgccaggtccgccgtttccacgtccagctcagcaaccctaagtttggggcccacctgggccagccccactccaccaccatcatcatcagggacccagatgaactggaccggagcttcacgagtcagatgttgtcatcacagccaccccctcacggcgacctgggcgccccgcagaaccccaatgctaaggccgctgggtccaggaagatccatttcaactggctgcccccttctggcaagccaatggggtacagggtaaagtactggattcagggcgactccgaatccgaagcccacctgctcgacagcaaggtgccctcagtggagctcaccaacctgtacccgtattgcgactatgagatgaaggtgtgcgcctacggggctcagggcgagggaccctacagctccctggtgtcctgccgcacccaccaggaagtgcccagcgagccagggcgtctggccttcaatgtcgtctcctccacggtgacccagctgagctgggctgagccggctgagaccaacggtgagatcacagcctacgaggtctgctatggcctggtcaacgatgacaaccgacctattgggcccatgaagaaagtgctggttgacaaccctaagaaccggatgctgcttattgagaaccttcgggagtcccagccctaccgctacacggtgaaggcgcgcaacggggccggctgggggcctgagcgggaggccatcatcaacctggccacccagcccaagaggcccatgtccatccccatcatccctgacatccctatcgtggacgcccagagcggggaggactacgacagcttccttatgtacagcgatgacgttctacgctctccatcgggcagccagaggcccagcgtctccgatgacactggctgcggctggaagttcgagcccctgctgggggaggagctggacctgcggcgcgtcacgtggcggctgcccccggagctcatcccgcgcctgtcggccagcagcgggcgctcctccgacgccgaggcccccacggccccccggacgacggcggcgcgggcgggaagggcggcagccgtgccccgcagtgcgacacccgggccccccggagagcacctggtgaatggccggatggactttgccttcccgggcagcaccaactccctgcacaggatgaccacgaccagtgctgctgcctatggcacccacctgagcccacacgtgccccaccgcgtgctaagcacatcctccaccctcacacgggactacaactcactgacccgctcagaacactcacactcgaccacactgcccagggactactccaccctcacctccgtctcctcccacgactctcgcctgactgctggtgtgcccgacacgcccacccgcctggtgttctctgccctggggcccacatctctcagagtgagctggcaggagccgcggtgcgagcggccgctgcagggctacagtgtggagtaccagctgctgaacggcggtgagctgcatcggctcaacatccccaaccctgcccagacctcggtggtggtggaagacctcctgcccaaccactcctacgtgttccgcgtgcgggcccagagccaggaaggctggggccgagagcgtgagggtgtcatcaccattgaatcccaggtgcacccgcagagcccactgtgtcccctgccaggctccgccttcactttgagcactcccagtgccccaggcccgctggtgttcactgccctgagcccagactcgctgcagctgagctgggagcggccacggaggcccaatggggatatcgtcggctacctggtgacctgtgagatggcccaaggaggagggccagccaccgcattccgggtggatggagacagccccgagagccggctgaccgtgccgggcctcagcgagaacgtgccctacaagttcaaggtgcaggccaggaccactgagggcttcgggccagagcgcgagggcatcatcaccatagagtcccaggatggaggacccttcccgcagctgggcagccgtgccgggctcttccagcacccgctgcaaagcgagtacagcagcatcaccaccacccacaccagcgccaccgagcccttcctagtggatgggctgaccctgggggcccagcacctggaggcaggcggctccctcacccggcatgtgacccaggagtttgtgagccggacactgaccaccagcggaacccttagcacccacatggaccaacagttcttccaaacttgaccgcaccctgccccacccccgccatgtcccactaggcgtcctcccgactcctctcccggagcctcctcagctactccatccttgcacccctgggggcccagcccacccgcatgcacagagcaggggctaggtgtctcctgggaggcatgaagggggcaaggtccgtcctctgtgggcccaaacctatttgtaaccaaagagctgggagcagcacaaggacccagcctttgttctgcacttaataaatggttttgctactgctaaaaaaaaaaaaaaaaaaaaaaaaaaaaaaaaaaaaaaaaaaaaaaaaaaaaaaaaaaaaaaaaaaaaaaaaaaaa

SEQ ID NO: 3749 - DNA, 1782 bp, Homo sapiens; identical to SEQ ID NO: 3114

SEQ ID NO: 3750 - DNA, 1840 bp, Homo sapiens
ggaagaggtaagcggttactcactccatggctgcagcaaggagaggcggcggcggcctcggctgaagaaagaagaaatcttcccaaggctgcagacaccgacggatttgctttgggagccagagtagctgccgccaccagagtccggagccatgagcggctttaattttggaggcactggggcccctacaggcgggttcacgtttggcactgcaaagacggcaacaaccacacctgctacagggttttctttctccacctctggcactggagggtttaattttggggctcccttccaaccagccacaagtaccccttccaccggcctgttctcacttgccacccagactccggccacacagacgacaggcttcacttttggaacagcgactcttgcttcggggggaactggattttctttggggatcggtgcttcaaagctcaacttgagcaacacagctgccaccccagccatggcaaaccccagcggctttgggctgggcagcagcaacctcactaatgccatatcgagcaccgtcacctccagccagggcacagcacccaccggctttgtgtttggcccctccaccacctctgtggctccagctaccacatctggaggcttctcattcactggtggaagcacggcccaaccctccggtttcaacattggctcagcagggaattcagcccagcccacggcacctgccacgttgcccttcactccggccacgccagcagccaccacagcaggtgccacacagccagctgctcccacacccacagccaccatcaccagtactgggcccagcctctttgcgtcaatagcaactgctccaacctcatctgccaccactggactctccctctgtacccctgtgaccacagcgggcgcccccactgctgggacacagggattcagcttaaaggcacctggagcagcttccggcacctccacaacaacatccaccgctgccaccgccaccgccaccaccaccaccagcagcagcaccaccggctttgccttgaatttaaaaccactggcgccagccgggatccccagcaatacagcagctgccgtgaccgctccacctggccctggcgcagctgcaggggcggctgccagctccgccatgacctacgcgcagctggagagcctgatcaacaaatggagcctggagctagaggaccaggagcggcacttcctccagcaggccacccaggtcaacgcctgggaccgcacgctgatcgagaatggagaaaagatcaccagcctgcaccgcgaggtggagaaggtgaagctggaccagaagaggctggaccaggagctcgacttcatcctgtcccagcagaaggagctggaagacctgctgagcccactggaggagttggtcaaggagcagagggcgaccatctacctgcagcacgcggatgaggagcgtcagaaaacctacaagctggctgagaacatcgacgcacagctcaagcgcatggcccaggatctcaaggacatcatcgagcacctgaacacgtccggggcccccgccgacaccagtgacccactgcagcagatctgcaagatcctcaatgcgcacatggactcactgcagtggatcgaccagaactcggccctgctgcagaggaaggtggaggaggtgaccaaggtgtgcgtgggccggcgcaaggagcaggagcgcagcttccggatcacctttgactgagcgacagcagccctggggcccgcaggtccctagggagttcatgaggggaatgcgccctgttgtctgtagtttggggttgtggcaagatacttgtttgtttgtttctttctttcacagacg

SEQ ID NO: 3751 - DNA, 2500 bp, Homo sapiens
cccaggcgcagccaatgggaagggtcggaggcatggcacagccaatgggaagggccggggcaccaaagccaatgggaagggccgggagcgcgcggcgcgggagatttaaaggctgctggagtgaggggtcgcccgtgcaccctgtcccagccgtcctgtcctggctgctcgctctgcttcgctgcgcctccactatgctctccctccgtgtcccgctcgcgcccatcacggacccgcagcagctgcagctctcgccgctgaaggggctcagcttggtcgacaaggagaacacgccgccggccctgagcgggacccgcgtcctggccagcaagaccgcgaggaggatcttccaggagcccacggagccgaaaactaaagcagctgcccccggcgtggaggatgagccgctgctgagagaaaacccccgccgctttgtcatcttccccatcgagtaccatgatatctggcagatgtataagaaggcagaggcttccttttggaccgccgaggaggttgacctctccaaggacattcagcactgggaatccctgaaacccgaggagagatattttatatcccatgttctggctttctttgcagcaagcgatggcatagtaaatgaaaacttggtggagcgatttagccaagaagttcagattacagaagcccgctgtttctatggcttccaaattgccatggaaaacatacattctgaaatgtatagtcttcttattgacacttacataaaagatcccaaagaaagggaatttctcttcaatgccattgaaacgatgccttgtgtcaagaagaaggcagactgggccttgcgctggattggggacaaagaggctacctatggtgaacgtgttgtagcctttgctgcagtggaaggcattttcttttccggttcttttgcgtcgatattctggctcaagaaacgaggactgatgcctggcctcacattttctaatgaacttattagcagagatgagggtttacactgtgattttgcttgcctgatgttcaaacacctggtacacaaaccatcggaggagagagtaagagaaataattatcaatgctgttcggatagaacaggagttcctcactgaggccttgcctgtgaagctcattgggatgaattgcactctaatgaagcaatacattgagtttgtggcagacagacttatgctggaactgggttttagcaaggttttcagagtagagaacccatttgactttatggagaatatttcactggaaggaaagactaacttctttgagaagagagtaggcgagtatcagaggatgggagtgatgtcaagtccaacagagaattcttttaccttggatgctgacttctaaatgaactgaagatgtgcccttacttggctgattttttttttccatctcataagaaaaatcagctgaagtgttaccaactagccacaccatgaattgtccgtaatgttcattaacagcatctttaaaactgtgtagctacctcacaaccagtcctgtctgtttatagtgctggtagtatcaccttttgccagaaggcctggctggctgtgacttaccatagcagtgacaatggcagtcttggctttaaagtgaggggtgaccctttagtgagcttagcacagcgggattaaacagtcctttaaccagcacagccagttaaaagatgcagcctcactgcttcaacgcagattttaatgtttacttaaatataaacctggcactttacaaacaaataaacattgttttgtactcacggcggcgataatagcttgatttatttggtttctacaccaaatacattctcctgaccactaatgggagccaattcacaattcactaagtgactaaagtaagttaaacttgtgtagactaagcatgtaatttttaagttttattttaatgaattaaaatatttgttaaccaactttaaagtcagtcctgtgtatacctagatattagtcagttggtgccagatagaagacaggttgtgtttttatcctgtggcttgtgtagtgtcctgggattctctgccccctctgagtagagtgttgtgggataaaggaatctctcagggcaaggagcttcttaagttaaatcactagaaatttaggggtgatctgggccttcatatgtgtgagaagccgtttcattttatttctcactgtattttcctcaacgtctggttgatgagaaaaaattcttgaagagttttcatatgtgggagctaaggtagtattgtaaaatttcaagtcatccttaaacaaaatgatccacctaagatcttgcccctgttaagtggtgaaatcaactagaggtggttcctacaagttgttcattctagttttgtttggtgtaagtaggttgtgtgagttaattcatttatatttactatgtctgttaaatcagaaattttttattatctatgttcttctagattttacctgtagttcataaaaaaaaaaaaaaaaaaaaaaaaa

SEQ ID NO: 3752 - DNA, 3226 bp, Homo sapiens
aatccatctgagaatatgctgccacaaataccctttttgctgctagtatccttgaacttggttcatggagtgttttacgctgaacgataccaaacgcccacaggcataaaaggcccactacccaacaccaagacacagttcttcattccctacaccataaagagtaaaggtatagcagtaagaggagagcaaggtactcctggtccaccaggccctgctggacctcgagggcacccaggtccttctggaccaccaggaaaaccaggctacggaagtcctggactccaaggagagccagggttgccaggaccaccgggaccatcagctgtagggaaaccaggtgtgccaggactcccaggaaaaccaggagagagaggaccatatggaccaaaaggagatgttggaccagctggcctaccaggaccccggggcccaccaggaccacctggaatccctggaccggctggaatttctgtgccaggaaaacctggacaacagggacccacaggagccccaggacccaggggctttcctggagaaaagggtgcaccaggagtccctggtatgaatggacagaaaggggaaatgggatatggtgctcctggtcgtccaggtgagaggggtcttccaggccctcagggtcccacaggaccatctggccctcctggagtgggaaaaagaggtgaaaatggggttccaggacagccaggcatcaaaggtgatagaggttttccgggagaaatgggaccaattggcccaccaggtccccaaggccctcctggggaacgagggccagaaggcattggaaagccaggagctgctggagccccaggccagccagggattccaggaacaaaaggtctccctggggctccaggaatagctgggcccccagggcctcctggctttgggaaaccaggcttgccaggcctgaagggagaaagaggacctgctggccttcctgggggtccaggtgccaaaggggaacaagggccagcaggtcttcctgggaagccaggtctgactggaccccctgggaatatgggaccccaaggaccaaaaggcatcccgggtagccatggtctcccaggccctaaaggtgagacagggccagctgggcctgcaggataccctggggctaagggtgaaaggggttcccctgggtcagatggaaaaccagggtacccaggaaaaccaggtctcgatggtcctaagggtaacccagggttaccaggtccaaaaggtgatcctggagttggaggacctcctggtctcccaggccctgtgggcccagcaggagcaaagggaatgcccggacacaatggagaggctggcccaagaggtgcccctggaataccaggtactagaggccctattgggccaccaggcattccaggattccctgggtctaaaggggatccaggaagtcccggtcctcctggcccagctggcatagcaactaagggcctcaatggacccaccgggccaccagggcctccaggtccaagaggcccctctggagagcctggtcttccagggccccctgggcctccaggcccaccaggtcaagcagtcatgcctgagggttttataaaggcaggccaaaggcccagtctttctgggacccctcttgttagtgccaaccagggggtaacaggaatgcctgtgtctgcttttactgttattctctccaaagcttacccagcaataggaactcccataccatttgataaaattttgtataacaggcaacagcattatgacccaaggactggaatctttacttgtcagataccaggaatatactatttttcataccacgtgcatgtgaaagggactcatgtttgggtaggcctgtataagaatggcacccctgtaatgtacacctatgatgaatacaccaaaggctacctggatcaggcttcagggagtgccatcatcgatctcacagaaaatgaccaggtgtggctccagcttcccaatgccgagtcaaatggcctatactcctctgagtatgtccactcctctttctcaggattcctagtggctccaatgtgagtacaccccacagagctaatctaaatcttgtgctagaaaaagcattctctaactctaccccaccctacaaaatgcatatggaggtaggctgaaaagaatgtaatttttattttctgaaatacagatttgagctatcagaccaacaaaccttccccctgaaaagtgagcagcaacgtaaaaacgtatgtgaagcctctcttgaatttctagttagcaatcttaaggctctttaaggttttctccaatattaaaaaatatcaccaaagaagtcctgctatgttaaaaacaaacaacaaaaaacaaagcaacaaaaaaaaaaattaaaaaaaaaaacagaaatagagctctaagttatgtgaaatttgatttgagaaactcggcatttcctttttaaaaaagcctgtttctaactatgaatatgagaacttctaggaaacatccaggaggtatcatataactttgtagaacttaaatacttgaatattcaaatttaaaagacactgtatcccctaaaatatttctgatggtgcactactctgaggcctgtatggcccctttcatcaatatctattcaaatatacaggtgcatatatacttgttaaagctcttatataaaaaagccccaaaatattgaagttcatctgaaatgcaaggtgctttcatcaatgaaccttttcaaaacttttctatgattgcagagaagctttttatatacccagcataacttggaaacaggtatctgacctattcttatttagttaacacaagtgtgattaatttgatttctttaattccttattgaatcttatgtgatatgattttctggatttacagaacattagcacatgtaccttgtgcctcccattcaagtgaagttataatttacactgagggtttcaaaattcgactagaagtggagatatattatttatttatgcactgtactgtatttttatattgctgtttaaaacttttaagctgtgcctcacttattaaagcacaaaatgttttacctactccttatttacgacacaataaaataacatcaatagatttttaggctgaattaatttgaaagcagcaatttgctgttctcaaccattctttcaaggcttttcattcgacacaataaaataacatcaatagatttttagggatgggtggcttt

SEQ ID NO: 3753 - DNA, 1552 bp, Homo sapiens; identical to SEQ ID NO: 516

SEQ ID NO: 3754 - DNA, 3348 bp, Homo sapiens; identical to SEQ ID NO: 3117

SEQ ID NO: 3755 - DNA, 971 bp, Homo sapiens
cggcctctctgcggggctcactctgcgcttcaccatggctttcattgccaagtccttctatgacctcagtgccatcagcctggatggggagaaggtagatttcaatacgttccggggcagggccgtgctgattgagaatgtggcttcgctctgaggcacaaccacccgggacttcacccagctcaacgagctgcaatgccgctttcccaggcgcctggtggtccttggcttcccttgcaaccaatttggacatcaggagaactgtcagaatgaggagatcctgaacagtctcaagtatgtccgtcctgggggtggataccagcccaccttcacccttgtccaaaaatgtgaggtgaatgggcagaacgagcatcctgtcttcgcctacctgaaggacaagctcccctacccttatgatgacccattttccctcatgaccgatcccaagctcatcatttggagccctgtgcgccgctcagatgtggcctggaactttgagaagttcctcatagggccggagggagagcccttccgacgctacagccgcaccttcccaaccatcaacattgagcctgacatcaagcgcctccttaaagttgccatatagatgtgaactgctcaacacacagatctcctactccatccagtcctgaggagccttaggatgcagcatgccttcaggagacactgctggacctcagcattcccttgatatcagtccccttcactgcagagccttgcctttcccctctgcctgtttccttttcctctcccaaccctctggttggtgattcaacttgggctccaagacttgggtaagctctgggccttcacagaatgatggcaccttcctaaaccctcatgggtggtgtctgagaggcgtgaagggcctggagccactctgctagaagagaccaataaagggcaggtgtggaaacggcaaaaaaaaaaaaaaaaaaaaaaaaaaaaaa

SEQ ID NO: 3756 - DNA, 4119 bp, Homo sapiens
ctggagagcctgctgcccgcccgcccgtaaaatggtcccctcggctggacagctcgccctgttcgctctgggtattgtgttggctgcgtgccaggccttggagaacagcacgtccccgctgagtgcagacccgcccgtggctgcagcagtggtgtcccattttaatgactgcccagattcccacactcagttctgcttccatggaacctgcaggtttttggtgcaggaggacaagccagcatgtgtctgccattctgggtacgttggtgcacgctgtgagcatgcggacctcctggccgtggtggctgccagccagaagaagcaggccatcaccgccttggtggtggtctccatcgtggccctggctgtccttatcatcacatgtgtgctgatacactgctgccaggtccgaaaacactgtgagtggtgccgggccctcatctgccggcacgagaagcccagcgccctcctgaagggaagaaccgcttgctgccactcagaaacagtggtctgaagagcccagaggaggagtttggccaggtggactgtggcagatcaataaagaaaggcttcttcaggacagcactgccagagatgcctgggtgtgccacagaccttcctacttggcctgtaatcacctgtgcagccttttgtgggccttcaaaactctgtcaagaactccgtctgcttggggttattcagtgtgacctagagaagaaatcagcggaccacgatttcaagacttgttaaaaaagaactgcaaagagacggactcctgttcacctaggtgaggtgtgtgcagcagttggtgtctgagtccacatgtgtgcagttgtcttctgccagccatggattccaggctatatatttctttttaatgggccacctccccacaacagaattctgcccaacacaggagatttctatagttattgttttctgtcatttgcctactggggaagaaagtgaaggaggggaaactgtttaatatcacatgaagaccctagctttaagagaagctgtatcctctaaccacgagactctcaaccagcccaacatcttccatggacacatgacattgaagaccatcccaagctatcgccacccttggagatgatgtcttatttattagatggataatggttttatttttaatctcttaagtcaatgtaaaaagtataaaaccccttcagacttctacattaatgatgtatgtgttgctgactgaaaagctatactgattagaaatgtctggcctcttcaagacagctaaggcttgggaaaagtcttccagggtgcggagatggaaccagaggctgggttactggtaggaataaaggtaggggttcagaaatggtgccattgaagccacaaagccggtaaatgcctcaatacgttctgggagaaaacttagcaaatccatcagcagggatctgtcccctctgttggggagagaggaagagtgtgtgtgtctacacaggataaacccaatacatattgtactgctcagtgattaaatgggttcacttcctcgtgagccctcggtaagtatgtttagaaatagaacattagccacgagccataggcatttcaggccaaatccatgaaagggggaccagtcatttattttccattttgttgcttggttggtttgttgctttatttttaaaaggagaagtttaactttgctatttattttcgagcactaggaaaactattccagtaatttttttttcctcatttccattcaggatgccggctttattaacaaaaactctaacaagtcacctccactatgtgggtcttcctttcccctcaagagaaggagcaattgttcccctgacatctgggtccatctgacccatggggcctgcctgtgagaaacagtgggtcccttcaaatacatagtggatagctcatccctaggaattttcattaaaatttggaaacagagtaatgaagaaataatatataaactccttatgtgaggaaatgctactaatatctgaaaagtgaaagatttctatgtattaactcttaagtgcacctagcttattacatcgtgaaaggtacatttaaaatatgttaaattggcttgaaattttcagagaattttgtcttcccctaattcttcttccttggtctggaagaacaatttctatgaattttctctttattttttttttataattcagacaattctatgacccgtgtcttcatttttggcactcttatttaacaatgccacacctgaagcacttggatctgttcagagctgaccccctagcaacgtagttgacacagctccaggtttttaaattactaaaataagttcaagtttacatcccttgggccagatatgtgggttgaggcttgactgtagcatcctgcttagagaccaatcaatggacactggtttttagacctctatcaatcagtagttagcatccaagagactttgcagaggcgtaggaatgaggctggacagatggcggaacgagaggttccctgcgaagacttgagatttagtgtctgtgaatgttctagttcctaggtccagcaagtcacacctgccagtgccctcatccttatgcctgtaacacacatgcagtgagaggcctcacatatacgcctccctagaagtgccttccaagtcagtcctttggaaaccagcaggtctgaaaaagaggctgcatcaatgcaagcctggttggaccattgtccatgcctcaggatagaacagcctggcttatttggggatttttcttctagaaatcaaatgactgataagcattggctccctctgccatttaatggcaatggtagtctttggttagctgcaaaaatactccatttcaagttaaaaatgcatcttctaatccatctctgcaagctccctgtgtttccttgccctttagaaaatgaattgttcactacaattagagaatcatttaacatcctgacctggtaagctgccacacacctggcagtggggagcatcgctgtttccaatggctcaggagacaatgaaaagcccccatttaaaaaaataacaaacattttttaaaaggcctccaatactcttatggagcctggatttttcccactgctctacaggctgtgactttttttaagcatcctgacaggaaatgttttcttctacatggaaagatagacagcagccaaccctgatctggaagacagggccccggctggacacacgtggaaccaagccagggatgggctggccattgtgtccccgcaggagagatgggcagaatggccctagagttcttttccctgagaaaggagaaaaagatgggattgccactcacccacccacactggtaagggaggagaatttgtgcttctggagcttctcaagggattgtgttttgcaggtacagaaaactgcctgttatcttcaagccaggttttcgagggcacatgggtcaccagttgctttttcagtcaatttggccgggatggactaatgaggctctaacactgctcaggagacccctgccctctagttggttctgggctttgatctcttccaacctgcccagtcacagaaggaggaatgactcaaatgcccaaaaccaagaacacattgcagaagtaagacaaacatgtatatttttaaatgttctaacataagacctgttctctctagccattgatttaccaggctttctgaaagatctagtggttcacacagagagagagagagtactgaaaaagcaactcctcttcttagtcttaataatttactaaaatggtcaacttttcattatctttattataataaacctgatgcttttttttagaactccttactctgatgtctgtatatgttgcactgaaaaggttaatatttaatgttttaatttattttgtgtggtaagttaattttgatttctgtaatgtgttaatgtgattagcagttattttccttaatatctgaattatacttaaagagtagtgagcaatataagacgcaattgtgtttttcagtaatgtgcattgttattgagttgtactgtaccttatttggaaggatgaaggaatgaacctttttttcctaaaaaaaaaaaaaaaaaaaaaaaaaaaaaaaaa

SEQ ID NO: 3757 - DNA, 368 bp, Homo sapiens; identical to SEQ ID NO: 3118

SEQ ID NO: 3758 - DNA, 3516 bp, Homo sapiens
tcgagggtgcgatggcgcggacgcgggaccgcgtacgcctgctgcttctcctgatctgctttaacgttggaagtggacttcacttacaggtcttaagcacaagaaatgaaaataagctgcttcctaaacatcctcatttagtgcggcaaaagcgcgcctggatcaccgcccccgtggctcttcgggagggagaggatctgtccaagaagaatccaattgccaagatacattctgatcttgcagaagaaagaggactcaaaattacttacaaatacactggaaaagggattacagagccaccttttggtatatttgtctttaacaaagatactggagaactgaatgttaccagcattcttgatcgagaagaaacaccattttttctgctaacaggttacgctttggatgcaagaggaaacaatgtagagaaacccttagagctacgcattaaggttcttgatatcaatgacaacgaaccagtgttcacacaggatgtctttgttgggtctgttgaagagttgagtgcagcacatactcttgtgatgaaaatcaatgcaacagatgcagatgagcccaataccctgaattcgaaaatttcctatagaatcgtatctctggagcctgcttatcctccagtgttctacctaaataaagatacaggagagatttatacaaccagtgttaccttggacagagaggaacacagcagctacactttgacagtagaagcaagagatggcaatggagaagttacagacaaacctgtaaaacaagctcaagttcagattcgtattttggatgtcaatgacaatatacctgtagtagaaaataaagtgcttgaagggatggttgaagaaaatcaagtcaatgtagaagttacgcgcataaaagtgttcgatgcagatgaaataggttctgataattggctggcaaattttacatttgcatcaggaaatgaaggaggttatttccacatagaaacagatgctcaaactaacgaaggaattgtgacccttattaaggaagtagattatgaagaaatgaagaatcttgacttcagtgttattgtcgctaataaagcagcttttcacaagtcgattaggagtaaatacaagcctacacccattcccatcaaggtcaaagtgaaaaatgtgaaagaaggcattcattttaaaagcagcgtcatctcaatttatgttagcgagagcatggatagatcaagcaaaggccaaataattggaaattttcaagcttttgatgaggacactggactaccagcccatgcaagatatgtaaaattagaagatagagataattggatctctgtggattctgtcacatctgaaattaaacttgcaaaacttcctgattttgaatctagatatgttcaaaatggcacatacactgtaaagattgtggccatatcagaagattatcctagaaaaaccatcactggcacagtccttatcaatgttgaagacatcaacgacaactgtcccacactgatagagcctgtgcagacaatctgtcacgatgcagagtatgtgaatgttactgcagaggacctggatggacacccaaacagtggccctttcagtttctccgtcattgacaaaccacctggcatggcagaaaaatggaaaatagcacgccaagaaagtaccagtgtgctgctgcaacaaagtgagaaaaagcttgggagaagtgaaattcagttcctgatttcagacaatcagggttttagttgtcctgaaaagcaggtccttacactcacagtttgtgaggttctgcatggcagcggctgcagggaagcacagcatgactcctatgtgggcctgggacccgcagcaattgcgctcatgattttggcctttctgctcctgctattggtaccacttttactgctgatgtgccattgcggaaagggcgccaaagcgtttacccccatacctggcaccatagagatgctgcatccttggaataatgaaggagcaccacctgaagacaaggtggtgccatcatttctgccagtggatcaagggggcagtctagtaggaagaaatggagtaggaggtatggccaaggaagccacgatgaaaggaagtagctctgcttccattgtcaaagggcaacatgagatgtccgagatggatggaaggtgggaagaacacagaagcctgctttctggtagagctacccagtttacaggggccacaggcgctatcatgaccactgaaaccacgaagaccgcaagggccacaggggcttccagagacatggccggagctcaggcagctgctgttgcactgaacgaagaattcttaagaaattatttcactgataaagcggcctcttacactgaggaagatgaaaatcacacagccaaagattgccttctggtttattctcaggaagaaactgaatcgctgaatgcttctattggttgttgcagttttattgaaggagagctagatgaccgcttcttagatgatttgggacttaaattcaagacgctagctgaagtttgcctgggtcaaaaaatagatataaataaggaaattgagcagagacaaaaacctgccacagaaacaagtatgaacacagcttcacattcactctgtgagcaaactatggttaattcagagaatacctactcctctggcagtagcttcccagttccaaaatctttgcaagaagccaatgcagagaaagtaactcaggaaatagtcactgaaagatctgtgtcttctaggcaggcgcaaaaggtagctacacctcttcctgacccaatggcttctagaaatgtgatagcaacagaaacttcctatgtcacagggtccactatgccaccaaccactgtgatcctgggtcctagccagccacagagccttattgtgacagagagggtgtatgctccagcttctaccttggtagatcagccttatgctaatgaaggtacagttgtggtcactgaaagagtaatacagcctcatgggggtggatcgaatcctctggaaggcactcagcatcttcaagatgtaccttacgtcatggtgagggaaagagagagcttccttgcccccagctcaggtgtgcagcctactctggccatgcctaatatagcagtaggacagaatgtgacagtgacagaaagagttctagcacctgcttccactctgcaatccagttaccagattcccactgaaaattctatgacggctaggaacaccacggtgtctggagctggagtccctggccctctgccagattttggtttagaggaatctggtcattctaattctaccataaccacatcttccaccagagtcaccaagcatagcactgtacagcattcttactcctaaacagcagtcagccacaaactgacccagagtttaattagcagtgactaatttcatgtttccaatgtacctgatttttcatgagccttacagacacacagagacacatacacattgatcttaaaatttttctcagtcactgatatgcaaagga

SEQ ID NO: 3759 - DNA, 1306 bp, Homo sapiens
ggagacagcccgccggccgcccggatctccacctgccaccccagagctgggacagagccgggctgcggcactgggagggagaccccacagtggcctcttctgccacccacgcccccacccctggcatggccgaccagctgactgaggagcaggtcacagaattcaaggaggccttctccctgtttgacaaggatggggacggctgcatcaccacccgcgagctgggcacggtcatgcggtccctgggccagaaccccacggaggccgagctgcgggacatgatgagtgagatcgaccgggacggcaacggcaccgtggacttccccgagttcctgggcatgatggccaggaagatgaaggacacggacaacgaggaggagatccgcgaggccttccgcgtgttcgacaaggacggcaacggcttcgtcagcgccgccgagctacgacacgtcatgacccggctgggggagaagctgagtgacgaggaggtggacgagatgatccgggccgcggacacggacggagacggacaggtgaactacgaggagtttgtccgtgtgctggtgtccaagtgaggccggcgcccaccatgctcctgggcgcccacgcggcccacagggcaagaacccggggcctcccgcctcctcccccatccccctgcctcccctgggcactgtggcttcctcctgcgcctggttgattcagcccacctctctgcatcccgcttcccgcgtctcttctctgcactcctgccgaccttcccacctgctcatctgaatgacacggaacgctcccactgcaggcaaaccgtgacgccctccccactcgggagaagcagagctgaccttaggaccgagcaccagggcaggttgcgctgactctgcggccctccaggacggacaccgggtgaccccttaggcaccaggcaagatccctaagaggcacccaatgcccaggccagggggctgcagccctcagcccccgccaggattccgcaggctcctggactggaagctccctccgcggtcggattctggagtgtgggaggcatcttggcctgcagtaagcggtgctgacggggactctggccacagaggtcaggcctcctgaaaacagcactgccttccgcgctgccccagcttgccccattccttgtccgccaacccaccgtgattcatcttctgaagctgggagtgaaactgggtcagctgtaacctgttcctattcatctggaaggagggaggcttggatgagcaggggatgagagctgcagggaaataaatgagatattcgtccttaaaaaaaa

SEQ ID NO: 3760 - DNA, 4858 bp, Homo sapiens
agactccggcccctgtcggccgccaagcccctccgcccctcacagcgcccaggtccgcggccgggccttgattttttggcggggaccgtcatggcgtcgcagccaaattcgtctgcgaagaagaaagaggagaaggggaagaacatccaggtggtggtgagatgcagaccatttaatttggcagagcggaaagctagcgcccattcaatagtagaatgtgatcctgtacgaaaagaagttagtgtacgaactggaggattggctgacaagagctcaaggaaaacatacacttttgatatggtgtttggagcatctactaaacagattgatgtttaccgaagtgttgtttgtccaattctggatgaagttattatgggctataattgcactatctttgcgtatggccaaactggcactggaaaaacttttacaatggaaggtgaaaggtcacctaatgaagagtatacctgggaagaggatcccttggctggtataattccacgtacccttcatcaaatttttgagaaacttactgataatggtactgaattttcagtcaaagtgtctctgttggagatctataatgaagagctttttgatcttcttaatccatcatctgatgtttctgagagactacagatgtttgatgatccccgtaacaagagaggagtgataattaaaggtttagaagaaattacagtacacaacaaggatgaagtctatcaaattttagaaaagggggcagcaaaaaggacaactgcagctactctgatgaatgcatactctagtcgttcccactcagttttctctgttacaatacatatgaaagaaactacgattgatggagaagagcttgttaaaatcggaaagttgaacttggttgatcttgcaggaagtgaaaacattggccgttctggagctgttgataagagagctcgggaagctggaaatataaatcaatccctgttgactttgggaagggtcattactgcccttgtagaaagaacacctcatgttccttatcgagaatctaaactaactagaatcctccaggattctcttggagggcgtacaagaacatctataattgcaacaatttctcctgcatctctcaatcttgaggaaactctgagtacattggaatatgctcatagagcaaagaacatattgaataagcctgaagtgaatcagaaactcaccaaaaaagctcttattaaggagtatacggaggagatagaacgtttaaaacgagatcttgctgcagcccgtgagaaaaatggagtgtatatttctgaagaaaattttagagtcatgagtggaaaattaactgttcaagaagagcagattgtagaattgattgaaaaaattggtgctgttgaggaggagctgaatagggttacagagttgtttatggataataaaaatgaacttgaccagtgtaaatctgacctgcaaaataaaacacaagaacttgaaaccactcaaaaacatttgcaagaaactaaattacaacttgttaaagaagaatatatcacatcagctttggaaagtactgaggagaaacttcatgatgctgccagcaagctgcttaacacagttgaagaaactacaaaagatgtatctggtctccattccaaactggatcgtaagaaggcagttgaccaacacaatgcagaagctcaggatatttttggcaaaaacctgaatagtctgtttaataatatggaagaattaattaaggatggcagctcaaagcaaaaggccatgctagaagtacataagaccttatttggtaatctgctgtcttccagtgtctctgcattagataccattactacagtagcacttggatctctcacatctattccagaaaatgtgtctactcatgtttctcagatttttaatatgatactaaaagaacaatcattagcagcagaaagtaaaactgtactacaggaattgattaatgtactcaagactgatcttctaagttcactggaaatgattttatccccaactgtggtgtctatactgaaaatcaatagtcaactaaagcatattttcaagacttcattgacagtggccgataagatagaagatcaaaaaaaggaactagatggctttctcagtatactgtgtaacaatctacatgaactacaagaaaataccatttgttccttggttgagtcacaaaagcaatgtggaaacctaactgaagacctgaagacaataaagcagacccattcccaggaactttgcaagttaatgaatctttggacagagagattctgtgctttggaggaaaagtgtgaaaatatacagaaaccacttagtagtgtccaggaaaatatacagcagaaatctaaggatatagtcaacaaaatgacttttcacagtcaaaaattttgtgctgattctgatggcttctcacaggaactcagaaattttaaccaagaaggtacaaaattggttgaagaatctgtgaaacactctgataaactcaatggcaacctggaaaaaatatctcaagagactgaacagagatgtgaatctctgaacacaagaacagtttatttttctgaacagtgggtatcttccttaaatgaaagggaacaggaacttcacaacttattggaggttgtaagccaatgttgtgaggcttcaagttcagacatcactgagaaatcagatggacgtaaggcagctcatgagaaacagcataacatttttcttgatcagatgactattgatgaagataaattgatagcacaaaatctagaacttaatgaaaccataaaaattggtttgactaagcttaattgctttctggaacaggatctgaaactggatatcccaacaggtacgacaccacagaggaaaagttatttatacccatcaacactggtaagaactgaaccacgtgaacatctccttgatcagctgaaaaggaaacagcctgagctgttaatgatgctaaactgttcagaaaacaacaaagaagagacaattccggatgtggatgtagaagaggcagttctggggcagtatactgaagaacctctaagtcaagagccatctgtagatgctggtgtggattgttcatcaattggcggggttccatttttccagcataaaaaatcacatggaaaagacaaagaaaacagaggcattaacacactggagaggtctaaagtggaagaaactacagagcacttggttacaaagagcagattacctctgcgagcccagatcaacctttaattcacttgggggttggcaattttatttttaaagaaaacttaaaaataaaacctgaaaccccagaacttgagccttgtgtatagattttaaaagaatatatatatcagccgggcgcggtggctcatgcctgtaatcccagcactttgggaggctgaggcgggtggattgcttgagcccaggagtttgagaccagcctggccaacgtggcaaaacctcgtctctgttaaaaattagccgggcgtggtggcacactcctgtaatcccagctactggggaggctgaggcacgagaatcacttgaacccaggaagcggggttgcagtgagccaaaggtacaccactacactccagcctgggcaacagagcaagactcggtctcaaaaacaaaatttaaaaaagatataaggcagtactgtaaattcagttgaattttgatatctacccatttttctgtcatccctatagttcactttgtattaaattgggtttcatttgggatttgcaatgtaaatacgtatttctagttttcatataaagtagttcttttataacaaatgaaaagtatttttcttgtatattattaagtaatgaatatataagaactgtactcttctcagcttgagcttaacataggtaaatatcaccaacatctgtccttagaaaggaccatctcatgttttttttcttgctatgacttgtgtattttcttgcatcctccctagacttccctatttcgctttctcctcggctcactttctccctttttatttttcaccaaaccatttgtagagctacaaaacctatcctttcttattttcagtagtcagaattttatctagaaatcttttaacacctttttagtggttatttctaaaatcactgtcaacaataaatctaaccctagttgtatccctcctttaagtatttaaaacttgttgccccaaatgtgaaagcatttaattcctttaagaggcctaactcattcaccctgacagagttcacaaaaagcccactttagagtatacattgctattatgggagaccacccagacatctgactaatggctctgtgccacactccaagacctgtgccttttagagaagctcacaatgatttaaggactgtttgaaacttccaattatgtctataatttatattcttttgtttacatgatgaaactttttgttgttgcttgtttgtatataatacaatgtgtacatgtatctttttctcgattcaaatcttaacccttaggactctggtatttttgatctggcaaccatatttctggaagttgagatgtttcagcttgaagaaccaaaacagaaggaatatgtacaaagaataaattttctgctcacgatgagtttagtgtgtaaagtttagagacatctgactttgatagctaaattaaaccaaaccctattgaagaattgaatatatgctacttcaagaaactaaattgatctcgtagaattatcttaataaaataatggctataatttctctgcaaaatcagatgtcagcataagcgatggataatacctaataaactgccctcagtaaatccatggttaataaatgtggtttctacatt

SEQ ID NO: 3761 - DNA, 1597 bp, Homo sapiens
aacaaactgcacccactgaactccgcagctagcatccaaatcagcccttgagatttgaggccttggagactcaggagttttgagagcaaaatgacaacacccagaaattcagtaaatgggactttcctggcagagccaatgaaaggccctattgctatgcaatctggtccaaaaccactcttcaggaggatgtcttcactggtgggccccacgcaaagcttcttcatgagggaatctaagactttgggggctgtccagattatgaatgggctcttccacattgccctggggggtcttctgatgatcccagcagggatctatgcacccatctgtgtgactgtgtggtaccctctctggggaggcattatgtatattatttccggatcactcctggcagcaacggagaaaaactccaggaagtgtttggtcaaaggaaaaatgataatgaattcattgagcctctttgctgccatttctggaatgattctttcaatcatggacatacttaatattaaaatttcccattttttaaaaatggagagtctgaattttattagagctcacacaccatatattaacatatacaactgtgaaccagctaatccctctgagaaaaactccccatctacccaatactgttacagcatacaatctctgttcttgggcattttgtcagtgatgctgatctttgccttcttccaggaacttgtaatagctggcatcgttgagaatgaatggaaaagaacgtgctccagacccaaatctaacatagttctcctgtcagcagaagaaaaaaaagaacagactattgaaataaaagaagaagtggttgggctaactgaaacatcttcccaaccaaagaatgaagaagacattgaaattattccaatccaagaagaggaagaagaagaaacagagacgaactttccagaacctccccaagatcaggaatcctcaccaatagaaaatgacagctctccttaagtgatttcttctgttttctgtttccttttttaaacattagtgttcatagcttccaagagacatgctgactttcatttcttgaggtactctgcacatacgcaccacatctctatctggcctttgcatggagtgaccatagctccttctctcttacattgaatgtagagaatgtagccattgtagcagcttgtgttgtcacgcttcttcttttgagcaactttcttacactgaagaaaggcagaatgagtgcttcagaatgtgatttcctactaacctgttccttggataggctttttagtatagtatttttttttgtcattttctccatcagcaaccagggagactgcacctgatggaaaagatatatgactgcttcatgacattcctaaactatcttttttttattccacatctacgtttttggtggagtcccttttgcatcattgttttaaggatgataaaaaaaaaataacaactagggacaatacagaacccattccatttatctttctacagggctgacattgtggcacattcttagagttaccacaccccatgagggaagctctaaatagccaacacccatctgttttttgtaaaaacagcatagctt

SEQ ID NO: 3762 - DNA, 2977 bp, Homo sapiens
tagcaagtttggcggctccaagccaggcgcgcctcaggatccaggctcatttgcttccacctagcttcggtgccccctgctaggcggggaccctcgagagcgatgccgatggatttgattttagttgtgtggttctgtgtgtgcactgccaggacagtggtgggctttgggatggaccctgaccttcagatggatatcgtcaccgagcttgaccttgtgaacaccacccttggagttgctcaggtgtctggaatgcacaatgccagcaaagcatttttatttcaagacatagaaagagagatccatgcagctcctcatgtgagtgagaaattaattcagctgttccagaacaagagtgaattcaccattttggccactgtacagcagaagccatccacttcaggagtgatactgtccattcgagaactggagcacagctattttgaactggagagcagtggcctgagggatgagattcggtatcactacatacacaatgggaagccaaggacagaggcacttccttaccgcatggcagatggacaatggcacaaggttgcactgtcagttagcgcctctcatctcctgctccatgtcgactgtaacaggatttatgagcgtgtgatagaccctccagataccaaccttcccccaggaatcaatttatggcttggccagcgcaaccaaaagcatggcttattcaaagggatcatccaagatgggaagatcatctttatgccgaatggatatataacacagtgtccaaatctaaatcacacttgcccaacctgcagtgatttcttaagcctggtgcaaggaataatggatttacaagagcttttggccaagatgactgcaaaactaaattatgcagagacaagacttagtcaattggaaaactgtcattgtgagaagacttgtcaagtgagtggactgctctatcgagatcaagactcttgggtagatggtgaccattgcaggaactgcacttgcaaaagtggtgccgtggaatgccgaaggatgtcctgtccccctctcaattgctccccagactccctcccagtacacattgctggccagtgctgtaaggtctgccgaccaaaatgtatctatggaggaaaagttcttgcagaaggccagcggattttaaccaagagctgtcgggaatgccgaggtggagttttagtaaaaattacagaaatgtgtcctcctttgaactgctcagaaaaggatcacattcttcctgagaatcagtgctgccgtgtctgtagaggtcataacttttgtgcagaaggacctaaatgtggtgaaaactcagagtgcaaaaactggaatacaaaagctacttgtgagtgcaagagtggttacatctctgtccagggagactctgcctactgtgaagatattgatgagtgtgcagctaagatgcattactgtcatgccaatactgtgtgtgtcaaccttcctgggttatatcgctgtgactgtgtcccaggatacattcgtgtggatgacttctcttgtacagaacacgatgaatgtggcagcggccagcacaactgtgatgagaatgccatctgcaccaacactgtccagggacacagctgcacctgcaaaccgggctacgtggggaacgggaccatctgcagagctttctgtgaagagggctgcagatacggtggaacgtgtgtggctcccaacaaatgtgtctgtccatctggattcacaggaagccactgcgagaaagatattgatgaatgttcagagggaatcattgagtgccacaaccattcccgctgcgttaacctgccagggtggtaccactgtgagtgcagaagcggtttccatgacgatgggacctattcactgtccggggagtcctgtattgacattgatgaatgtgccttaagaactcacacctgttggaacgattctgcctgcatcaacctggcagggggttttgactgtctctgcccctctgggccctcctgctctggtgactgtcctcatgaaggggggctgaagcacaatggccaggtgtggaccttgaaagaagacaggtgttctgtctgctcctgcaaggatggcaagatattctgccgacggacagcttgtgattgccagaatccaagtgctgacctattctgttgcccagaatgtgacaccagagtcacaagtcaatgtttagaccaaaatggtcacaagctgtatcgaagtggagacaattggacccatagctgtcagcagtgtcggtgtctggaaggagaggtagattgctggccactcacttgccccaacttgagctgtgagtatacagctatcttagaaggggaatgttgtccccgctgtgtcagtgacccctgcctagctgataacatcacctatgacatcagaaaaacttgcctggacagctatggtgtttcacggcttagtggctcagtgtggacgatggctggatctccctgcacaacctgtaaatgcaagaatggaagagtctgttgttctgtggattttgagtgtcttcaaaataattgaagtatttacagtggactcaacgcagaagaatggacgaaatgaccatccaacgtgattaaggataggaatcggtagtttggtttttttgtttgttttgtttttttaaccacagataattgccaaagtttccacctgaggacggtgtttcggaggttgccttttggacctaccactttgctcattcttgctaacctagtctaggtgacctacagtgccgtgcatttaagtcaatggttgttaaaagaagtttcccgtgttgtaaatcatgtttcccttatcagatcatttgcaaatacatttaaatgatctcatggtaaatggttgatgtattttttgggtttattttgtgtactaaccataatagagagagactcagctccttttatttattttgttgatttatggatcaaattctaaaataaagttgcctgttgtgactttt

SEQ ID NO: 3763 - DNA, 1025 bp, Homo sapiens; identical to SEQ ID NO: 2057

SEQ ID NO: 3764 - DNA, 2110 bp, Homo sapiens
gtgaagtgctcagaatggggcaggatgtcacctggaatcagcactaagtgattcagactttccttacttttaaatgtgctgctcttcatttcaagatgccgttgcagctctgataaatgcaaactgacaaccttcaaggccacgacggagggaaaatcattggtgcttggagcatagaagactgcccttcacaaaggaaatccctgattattgtttgaaatgctgaggacgttgctgcgaaggagacttttttcttatcccaccaaatactactttatggttcttgttttatccctaatcaccttctccgttttaaggattcatcaaaagcctgaatttgtaagtgtcagacacttggagcttgctggggagaatcctagtagtgatattaattgcaccaaagttttacagggtgatgtaaatgaaatccaaaaggtaaagcttgagatcctaacagtgaaatttaaaaagcgccctcggtggacacctgacgactatataaacatgaccagtgactgttcttctttcatcaagagacgcaaatatattgtagaaccccttagtaaagaagaggcggagtttccaatagcatattctatagtggttcatcacaagattgaaatgcttgacaggctgctgagggccatctatatgcctcagaatttctattgcgttcatgtggacacaaaatccgaggattcctatttagctgcagtgatgggcatcgcttcctgttttagtaatgtctttgtggccagccgattggagagtgtggtttatgcatcgtggagccgggttcaggctgacctcaactgcatgaaggatctctatgcaatgagtgcaaactggaagtacttgataaatctttgtggtatggattttcccattaaaaccaacctagaaattgtcaggaagctcaagttgttaatgggagaaaacaacctggaaacggagaggatgccatcccataaagaagaaaggtggaagaagcggtatgaggtcgttaatggaaagctgacaaacacagggactgtcaaaatgcttcctccactcgaaacacctctcttttctggcagtgcctacttcgtggtcagtagggagtatgtggggtatgtactacagaatgaaaaaatccaaaagttgatggagtgggcacaagacacatacagccctgatgagtatctctgggccaccatccaaaggattcctgaagtcccgggctcactccctgccagccataagtatgatctatctgacatgcaagcagttgccaggtttgtcaagtggcagtactttgagggtgatgtttccaagggtgctccctacccgccctgcgatggagtccatgtgcgctcagtgtgcattttcggagctggtgacttgaactggatgctgcgcaaacaccacttgtttgccaataagtttgacgtggatgttgacctctttgccatccagtgtttggatgagcatttgagacacaaagctttggagacattaaaacactgaccattacgggcaattttatgaacaagaagaaggatacacaaaacgtaccttatctgtttccccttccttgtcagcgtcgggaagatggtatgaagtcctctttggggcagggactctagtagatcttcttgtcagagaagctgcatggtttctgcagagcacagttagctagaaaggtgatagcattaaatgttcatctagagttaatagtgggaggagtaaaggtagccttgaggccagagcaggtagcaaggcattgtggaaagaggggaccagggtggctggggaagaggccgatgcataaagtcagcctgttccaagtgctcagggacttagcaaaatgagaagatgtgacctgtgccaaaactattttgagaattttaaatgtgaccatttttctggtatgccaataaaddcttacagcaacaaataatcaaagatacaattaatctgatattatatttgttgaaatagaaatttgattgtactataaatgatttttgtaaataatttatattctgctctaatactgtactgtgtagtgtgtctccgtatgtcatctcagggagcttaaaatgggcttgatttaacattgaaaaaaaat

SEQ ID NO: 3765 - DNA, 4067 bp, Homo sapiens
cttgaatcttggggcaggaactcagaaaacttccagcccgggcagcgcgcgcttggtgcaagactcaggagctagcagcccgtccccctccgactctccggtgccgccgctgcctgctcccgccaccctaggaggcgcggtgccacccactactctgtcctctgcctgtgctccgtgcccgaccctatcccggcggagtctccccatcctcctttgctttccgactgcccaaggcactttcaatctcaatctcttctctctctctctctctctctctgtctctctctctctctctctctctctctctctcgcagggtggggggaagaggaggaggaattctttccccgcctaacatttcaagggacacaattcactccaagtctcttccctttccaagccgcttccgaagtgctcccggtgcccgcaactcctgatcccaacccgcgagaggagcctctgcgacctcaaagcctctcttccttctccctcgcttccctcctcctcttgctacctccacctccaccgccacctccacctccggcacccacccaccgccgccgccgccaccggcagcgcctcctcctctcctcctcctcctcccctcttctctttttggcagccgctggacgtccggtgttgatggtggcagcggcggcagcctaagcaacagcagccctcgcagcccgccagctcgcgctcgccccgccggcgtccccagccctatcacctcatctcccgaaaggtgctgggcagctccggggcggtcgaggcgaagcggctgcagcggcggtagcggcggcgggaggcaggatgagcgcacgcggtgagggcgcggggcagccgtccacttcagcccagggacaacctgccgccccagcgcctcagaagagaggacgcggccgccccaggaagcagcagcaagaaccaaccggtgagccctctcctaagagacccaggggaagacccaaaggcagcaaaaacaagagtccctctaaagcagctcaaaagaaagcagaagccactggagaaaaacggccaagaggcagacctaggaaatggccacaacaagttgttcagaagaagcctgctcaggaggaaactgaagagacatcctcacaagagtctgccgaagaggactagggggcgcaacgttcgatttctacctcagcagcagttggatcttttgaagggagaagacactgcagtgaccacttattctgtattgccatggtctttccactttcatctggggtggggtggggtggggtgggggaggggggggtggggtggggagaaatcacataaccttaaaaaggactatattaatcaccttctttgtaatcccttcacagtcccaggtttagtgaaaaactgctgtaaacacaggggacacagcttaacaatgcaacttttaattactgttttcttttttcttaacctactaatagtttgttgatctgataagcaagagtgggcgggtgagaaaaaccgaattgggtttagtcaatcactgcactgcatgcaaacaagaaacgtgtcacacttgtgacgtcgggcattcatataggaagaacgcggtgtgtaacactgtgtacacctcaaataccaccccaacccactccctgtagtgaatcctctgtttagaacaccaaagataaggactagatactactttctctttttcgtataatcttgtagacacttacttgatgatttttaactttttatttctaaatgagacgaaatgctgatgtatcctttcattcagctaacaaactagaaaaggttatgttcatttttcaaaaagggaagtaagcaaacaaatattgccaactcttctatttatggatatcacacatatcagcaggagtaataaatttactcacagcacttgttttcaggacaacacttcattttcaggaaatctacttcctacagagccaaaatgccatttagcaataaataacacttgtcagcctcagagcatttaaggaaactagacaagtaaaattatcctctttgtaatttaatgaaaaggtacaacagaataatgcatgatgaactcacctaattatgaggtgggaggagcgaaatctaaatttcttttgctatagttatacatcaatttaaaaagcaaaaaaaaaaaggggggggcaatctctctctgtgtctttctctctctctctccctctccctctctcttttcatgtgtatcagtttccatgaaagacctgaataccacttacctcaaattaagcatatgtgttacttcaagtaatacgttttgacataagatggttgaccaaggtgcttttcttcggcttgagttcaccatctcttcattcaaactgcacttttagccagagatgcaatatatccccactactcaatactacctctgaatgttacaacgaatttacagtctagtacttattacatgctgctatacacaagcaatgcaagaaaaaaacttactgggtaggtgattctaatcatctgcagttctttttgtacacttaattacagttaaagaagcaatctccttactgtgtttcagcatgactatgtatttttctatgtttttttaattaaaaatttttaaaatacttgtttcagcttctctgctagatttctacattaacttgaaaattttttaaccaagtcgctcctaggttcttaaggataattttcctcaatcacactacacatcacacaagatttgactgtaatatttaaatattaccctccaagtctgtacctcaaatgaattctttaaggagatggactaattgacttgcaaagacctacctccagacttcaaaaggaatgaacttgttacttgcagcattcatttgttttttcaatgtttgaaatagttcaaactgcagctaaccctagtcaaaactatttttgtaaaagacatttgatagaaaggaacacgtttttacatacttttgcaaaataagtaaataataaataaaataaagccaaccttcaaagaacttgaagctttgtaggtgagatgcaacaagccctgcttttgcataatgcaatcaaaaatatgtgtttttaagattagttgaatataagaaaatgcttgacaaatattttcatgtattttacacaaatgtgatttttgtaatatgtctcaaccagatttattttaaacgcttcttatgtagagtttttatgcctttctctcctagtgagtgtgctgactttttaacatggtattatcaactgggccaggaggtagtttctcatgacggcttttgtcagtatggcttttagtactgaagccaaatgaaactcaaaaccatctctcttccagctgcttcagggaggtagtttcaaaggccacatacctctctgagactggcagatcgctcactgttgtgaatcaccaaaggagctatggagagaattaaaactcaacattactgttaactgtgcgttaaataagcaaataaacagtggctcataaaaataaaagtcgcattccatatctttggatgggccttttagaaacctcattggccagctcataaaatggaagcaattgctcatgttggccaaacatggtgcaccgagtgatttccatctctggtaaagttacacttttatttcctgtatgttgtacaatcaaaacacactactacctcttaagtcccagtatacctcatttttcatactgaaaaaaaaagcttgtggccaatggaacagtaagaacatcataaaatttttatatatatagtttatttttgtgggagataaattttataggactgttctttgctgttgttggtcgcagctacataagactggacatttaacttttctaccatttctgcaagttaggtatgtttgcaggagaaaagtatcaagacgtttaactgcagttgactttctccctgttcctttgagtgtcttctaactttattctttgttctttatgtagaattgctgtctatgattgtactttgaatcgcttgcttgttgaaaatatttctctagtgtattatcactgtctgttctgcacaataaacataacagcctctgtgatccc

SEQ ID NO: 3766 - DNA, 995 bp, Homo sapiens
taaaatgtgaggcgattattttaagtaattatcttaccaagcccaagactggttttaaagttacctgaagctcttaacttcctcccctctgaatttagtttggggaaggtgtttttagtacaagacatcaaagtgaagtaaagcccaagtgttctttagctttttataatactgtctaaatagtgaccatctcatgggcattgttttcttctctgctttgtctgtgttttgagtctgctttcttttgtctttaaaacctgatttttaagttcttctgaactgtagaaatagctatctgatcacttcagcgtaaagcagtgtgtttattaaccatccactaagctaaaactagagcagtttgatttaaaagtgtcactcttcctccttttctactttcagtagatatgagatagagcataattatctgttttatcttagttttatacataatttaccatcagatagaactttatggttctagtacagatactctactacactcagcctcttatgtgccaagtttttctttaagcaatgagaaattgctcatgttcttcatcttctcaaatcatcagaggccaaagaaaaacactttggctgtgtctataacttgacacagtcaatagaatgaagaaaattagagtagttatgtgattatttcagctcttgacctgtcccctctggctgcctctgagtctgaatctcccaaagagagaaaccaatttctaagaggactggattgcagaagactcggggacaacatttgatccaagatcttaaatgttatattgataaccatgctcagcaatgagctattagattcattttgggaaatctccataatttcaatttgtaaactttgttaagacctgtctacattgttatatgtgtgtgacttgagtaatgttatcaacgtttttgtaaatatttactatgtttttctattagctaaattccaacaattttgtactttaataaaatgttctaaacattgc

SEQ ID NO: 3767 - DNA, 1098 bp, Homo sapiens
aattctcctgtgtgagctaaaatacagtggctcggtccaacaaaacagagcctggagccaggaattatggcgaacctgctccctccgtcctccttcggcgaagatccctggcgcgcgtccttgaggtcgccttcggtgttgacctcatcgtcggaacggcgcttcctgaagctttatataagcacggctctgaatccgctcgtcggattaaatcctgcgctggcgtcctgccagtctctcgctccatttgctcttcctgaggctccctccagagacctttcccttagcctcagtgcgaatgcttccgggcgtcctcagaaccagagcacagccaaagccactacagaatccggaagcccggttgggatctgaattctcccggggaccgttgcgtaggcgttaaaaaaaaaaaagagtgagagggacctgagcagagtggaggaggagggagaggaaaacagaaaagaaatgacgaaatgtcgagagggcggggacaattgagaacgcttcccgccggcgcgctttcggttttcaatctggtccgatactcttgtatatcaggggaagacggtgctcgccttgacagaagctgtctatcgggctccagcggtcatgtccggcagaggaaagggcggaaaaggcttaggcaaagggggcgctaagcgccaccgcaaggtcttgagagacaacattcagggcatcaccaagcctgccattcggcgtctagctcggcgtggcggcgttaagcggatctctggcctcatttacgaggagacccgcggtgtgctgaaagtgttcttggagaatgtgattcgggacgcagtcacctacaccgagcacgccaagcgcaagaccgtcacagccatggatgtggtgtacgcgctcaagcgccaggggagaaccctctacggcttcggaggctaggcgccgctccagctttgcacgtttcgatcccaaaggccctttttgggccgaccacttgctcatcctgaggagttggacacttgactgcgtaaagtgcaacagtaacgatgttggaaggtaactttggcagtggggcgacaatcggatctgaagttaacggaaagacataaccgc

SEQ ID NO: 3768 - DNA, 3127 bp, Homo sapiens; identical to SEQ ID NO: 3101

SEQ ID NO: 3769 - DNA, 3835 bp, Homo sapiens
catgcgtgactgcccccacactcacacagctctcactccccacatgctccatgcctcctgtccccactgaggagagctcctagaggctcgcccgctccccactgacatgcatccctgcagacaaacgaggcgcccagagagcttccccactgcacttgccagggctgcgggcccagccttgcccctagcttcctctggcgggagctatggctcggaggagaatggggacttctgaacatacctgcccgcaagggggaccggaggtgctcggagtgggcttgtgagggaggtggtgccgcagtccccgctgagcagcctggccccccagatcgtgtacttcactgctacattcccctacgtggtcgtggtcgtgctgcttgtgcttggagtgctgctgcctggcgccctggacagcatcatttactatctcaagcctgactggtcaaagctggggtcccctcaggtgaggtggaggtggggaggctgcagcagggtgttgtgggggagccctgcaggcccctcatgcctgcactctccagccctttctctgtaggtatggatagatgtggggacccagattttcttttcttatgccattggcctgggggccctcacagccctgggcagctacaaccgcttcaacaacaactgctacaagtaagcactgctgccctgccacccgtgccctgtcccgccctgccctgcccagcagcctaacccatccactctggcccctccacccctccaggacgccatcatcctggctgtcatcaacagtgggaccagcttctttgctggcttcgtggtcttctccatcctgggcttcatggctgcagagcagggcatgcacatctccaaggtggcagagtcaggtagggccctacccccagccccgcctccagagcagcaactgccacccagatgcatgatgtacaagaacacgcaatagaaatgctgaaaagtgatgaggattcaaacagaacttctcagattgtgggcctgtgggggcaggtcctgggatttttcaatgttgacagagacaggacctcccagcccctgctgcatgacccagggttgacagcacctcagaggcaggcgtgggcatgggcgtgagtgttgcaggcagggctcagggtgcgcgcagggcacgacatcggctgcaaggtctagagcctgcacctttcccacagggccgggcctggccttcatcgcctacccacaggctgtcacactgatgccagtggccccactctgggctgccctgttcttcttcatgctgttgctgcttggtctcgacaaccagtttgcatgggctctgggacagggagccaggagaggggcggagtgagggctgcgggcaaggaaaggggtggagggtggtgcggggctcggcctgagctagcctggccacagtttgtaggtgtggagggcttcatcaccggcctcctcaacctcctcccggcctcctactacttctgtttccaaagggagatctctgtggccctctgttgtgccctccgctttgtcattgatctctccatggtgactgatgtgagtggggtggggggtctgcctgtgacctctggtggccgtctgccatcctccctgactgggctctgtcccccagggtgggatgtatgtcttccagctgtttgactactactcggccagcggcaccaccctgctctggcaggccttttgggagtgcgtggtggtggtctgggtgtatggtaggtcatggctgagggctgggctggggcatggtgacggggaaggcaggtctccagcttggccctcccgcctcgccttgccacaggagctgaccgcttcacggacgacattgcctgtatgatcgggtaccgaccttgcccctggatgaaatggtgctggtccttcttcaccccgctggtttgcatggtaagggctgggggaggtggggcggggtggggggggcggggcggggtgggggccccattaaggacgggcattctggtctgtagggcatcttcatcttcaacgttgtgtactacaagccgctggtctacaacaacacctacgtgtacccgtggtggggtgaggccatgggctgggccttcgtgctgtcctccatgctgtgcatgccactgcacctcctgggctgcctcctcagggccaagggcaccatggctgaggtaaggctccctcccggcctgccctcccctcccctgctatgaacattcaacccagcctgcttcctagccaaggagtggccctgactagggtggcaggcagcaggagctggagagagaggcagaggaagtcaccgtggggatgagcaggtgactctgggggcttcaacatgtcctctcctgcagtgctggaagcacctgacccagcccatctggggcctccaccacttggagtaccgagctcaggatgcagatgtcaggggcctgaccaccctgaccccagtgtccgagagcagcaaggtcgtcgtggtggagagtgtcatgggacagctcagctcacatcaccagctcacctctggtagccatagcagcccctgcttcatccccaccccacccctccagggggcctgcctttccctgacacttttggggtctgcctgggagaggaggggagaaagcaccatgagtgctcactaaaacaactttttccatttttaataaaacgccaaaaatatcacaacccaccaaaaatagatgcctctccccctccagtcctagcccagctggtcctaggccccgcctagtgccccacccccacccacagtgctgcactcctcctgcccctgccacgcccaccccctgcccacctctccaggttctgctctgtagcacacccttgggtgacccctcaccccagaagcagcagtggcagcttgggaaatgtgaggaagggaaggagggagagacgggagggaggagagagaggagaagggaggcaggggaggggcagcagaaccaagacaaatatttcagctgggctatacccctctccccatccctgttatagaagcttagagagccagccagcagtggaaccttctggttcctgcgccaatcaccaccaatatcaattgtgtgagcttgggtgcgagtgcacgcgtgcgtgagcacgtagagtatatatagatctctatctcttagcaaaggtgaataccagatgtaaatggtgcctctgggcaaaggaggcttgtattttgcacattttataacaacttgagagaatgagatttctgcttgtatatttctaaaaagaggaaggagccccaaacccatcctctcctttaccactccccatttcctgtgagccctaccttacccctctgcccctagcctaggagtgtgaatttatagatctaactttcagaggcaaaacaaaagcttcgagctgttgatgtgcagtctgttgtgtggatgtgtgtgtgtggtcccccagacccagaatggattggaaaagtgcatggtggggcctcggggctgtccccacgctgtccctttgcccacaggtctgtggggcaacaggctgcaatattccatcctgggtgtctgggctgctaacctggcctgctcaggcttcccaccctgtgccctgggctgggcacacccccgggaagggaccccggacacggctcccacatccaggctcaaggcggatgcacttcctgcacctccagtcttctgtgtagcggctttaacccacgtatgtctgtcacgtccagtcccgagacggctgagtgaccccaagaaaggcttccctgacacccggacagaggctggagggctggggctgggtgagggtggtgggcctgcggggacattctactgtgcta

SEQ ID NO: 3770 - DNA, 3153 bp, Homo sapiens
ccggggccacgcgattggcgcgaagttttcttttctccttccaccttcttttcatttctagtgagacacacgctttggtcctggctttcggcccgtagttgtagaaggagccctgctggtgcaggttagaggtgccgcatcccccggagctctcgaagtggaggcggtaggaaacggagggcttgcggctagccggaggaagctttggagccggaagccatggcacactaccccacaaggctgaagaccagaaaaacttattcatgggttggcaggcccttgttggatcgaaaactgcactaccaaacctatagagaaatgtgtgtgaaaacagaaggttgttccaccgagattcacatccagattggacagtttgtgttgattgaaggggatgatgatgaaaacccgtatgttgctaaattgcttgagttgttcgaagatgactctgatcctcctcctaagaaacgtgctcgagtacagtggtttgtccgattctgtgaagtccctgcctgtaaacggcatttgttgggccggaagcctggtgcacaggaaatattctggtatgattacccggcctgtgacagcaacattaatgcggagaccatcattggccttgttcgggtgatacctttagccccaaaggatgtggtaccgacgaatctgaaaaatgagaagacactctttgtgaaactatcctggaatgagaagaaattcaggccactttcctcagaactatttgcggagttgaataaaccacaagagagtgcagccaagtgccagaaacccgtgagagccaagagtaagagtgcagagagcccttcttggaccccagcagaacatgtggccaaaaggattgaatcaaggcactccgcctccaaatctcgccaaactcctacccatcctcttaccccaagagccagaaagaggctggagcttggcaacttaggtaaccctcagatgtcccagcagacttcatgtgcctccttggattctccaggaagaataaaacggaaagtggccttctcggagatcacctcaccttctaagagatctcagcctgataaacttcaaaccttgtctccagctctgaaagccccagagaaaaccagagagactggactctcttatactgaggatgacaagaaggcttcacctgaacatcgcataatcctgagaacccgaattgcagcttcgaaaaccatagacattagagaggagagaacacttacccctatcagtgggggacagagatcttcagtggtgccatccgtgattctgaaaccagaaaacatcaaaaagagggatgcaaaagaagcaaaagcccagaatgaagcgacctctactccccatcgtatccgcagaaagagttctgtcttgactatgaatcggattaggcagcagcttcggtttctaggtaatagtaaaagtgaccaagaagagaaagagattctgccagcagcagagatttcagactctagcagtgacgaagaagaggcttccacaccgccccttccaaggagagcacccagaactgtgtccaggaacctgcgatcttccttgaagtcatccttacataccctcacgaaggtgccaaagaagagtctcaagcctagaacgccacgttgtgccgctcctcagatccgtagtcgaagcctggctgcccaggagccagccagtgtgctggaggaagcccgactgaggctgcatgtttctgctgtacctgagtctcttccctgtcgggaacaggaattccaagacatctacaattttgtggaaagcaaactccttgaccataccggagggtgcatgtacatctccggtgtccctgggacagggaagactgccactgttcatgaagtgatacgctgcctgcagcaggcagcccaagccaatgatgttcctccctttcaatacattgaggtcaatggcatgaagctgacggagccccaccaagtctatgtgcacatcttgcagaagctaacaggccaaaaagcaacagccaaccatgcggcagaactgctggcaaagcaattctgcacccgagggtcacctcaggaaaccaccgtcctgcttgtggatgagctcgaccttctgtggactcacaaacaagacataatgtacaatctctttgactggcccactcataaggaggcccggcttgtggtcctggcaattgccaacacaatggacctgccagagcgaatcatgatgaaccgggtgtccagccgactgggtcttaccaggatgtgcttccagccctatacatatagccagctgcagcagatcctaaggtcccggctcaagcatctaaaggcctttgaagatgatgccatccagctggtagccaggaaggtagcagcactgtctggagatgcacgacggtgcctggacatctgcaggcgtgccacagagatctgtgagttctcccagcagaagcctgactcccctggcctggtcaccatagcccactcaatggaagctgtggatgagatgttttcatcatcatacatcacggccatcaaaaattcctctgttctggaacagagcttcctgagagccatcctcgcagagttccgtcgatcaggactggaggaagccacgtttcaacagatatatagtcaacatgtggcactgtgcagaatggagggactgccgtaccccaccatgtcagagaccatggccgtgtgttctcacctgggctcctgtcgcctcctgcttgtggagcccagcaggaacgatctgctccttcgggtgcggctcaacgtcagccaggatgatgtgctgtatgcgctgaaagacgagtaaaggggcttcacaagttaaaagactggggtcttgctgggttttgttttttgagacagggtcttgctctgtcgcccaggctggagtgcagtggcacgatcatggctcactgcagccttgacttctcaggcttaggtgaccccccaacctcatcctcccaggtggctgaaactacaggcacatgccaccatgcccagctgattttttgtagagacagggcttcaccatgttgccaagctagtctacaaagcatctgattttggaagtacatggaattgttgtaacaaagtatattgaatggaaatggctctcatgtattttggaattttccattaaataatttgcttttta

SEQ ID NO: 3771 - DNA, 683 bp, Homo sapiens
aactcctggtactctagcaccgatctgctttggagaacctgatcctgagactccagcaggatgtcttatcaacagcagcagtgcaagcagccctgccagccacctcctgtgtgccccacgccaaattgcccagagccatgtccacccccgaagtcccctgagccctgcccaccatcaaagtgtccacagccctgcccacctcagcagtgccagcagaaatatcctcctgtgacaccttccccaccctgccagccaaagtgtccacccaagagcaagtaacagcttcaggattcatcaggaccatgagaggataaggataattggctcacctcgttccacacctccacttgcatcttctcaccaaagccttccatggatgcacagggagcttctttctccttaacctgtggcctgcctgtgatgatctgtgacagcaaaagattccctttctgaggctgccatactgccactgtccaggtggagctaagaaaaggaagtcctcagctgtgccagctcccagagcttcagcagaaagagcagcagctctctccctgggaaccatcagacaattctgttgatgtgttctgtgtctgtctgtcacctggtcatgagcttctaccacctttgcaattgtcatttatcgttcactccctgaataaagtatctatgcatatatatttgta

SEQ ID NO: 3772 - DNA, 751 bp, Homo sapiens
cgggaggtgtagaaaaggatttagggtaggtttcgcataaatatccaatcaaaaagtagacttgaatttaacttttttattggctgatttggtccaatcagggattgagaatgattaagcacctatttgcataaaagacctacaaaaacggccagctgtgctgttgagccttcactttggggtgtattcttactcctttatcttgttgcaatgcctgatccagctaagtccgctcccgccccgaagaagggctccaagaaggcggtgaccaaggcgcagaagaaggatggcaagaagcgtaaacgcagccgcaaggagagctactccgtatacgtttacaaggtgctgaagcaagtccaccccgacaccggcatctcctccaaagccatggggatcatgaattcctttgtcaacgatatcttcgagcgcatcgccggcgaggcttcccgcctggctcattacaacaagcgttcgaccattacctccagggagatccagacagccgtgcgcctgctgctgcctggggaactggccaagcacgccgtgtccgagggcactaaggccgtcaccaagtacaccagctccaaataaatggacgcatgttcaaacccaaaggctcttttcagagccacttaatgatttcaattaagagttttaatgctgggtgctgctgtattctatgggagaagtgtcgccaatacaggtaaaattttcctacatcacctgtttattctgtgcgtttgacaaacac

SEQ ID NO: 3773 - DNA, 701 bp, Homo sapiens
gttaaaatatgcctaaatttcctctttgggaacgcaagacttgcagagatgactccatggagagcggactctgccggcgggaactggagtcgttggtgacgtcatcccagtctgatctgtgaagggtagggccagcaggcagcaccaaagttcccgtatgcgcgttttcagtcttcatttaggtccgaattcccggcatataagaatactaccgtcgcttgtttttcagatttttgcggctattttcgttggtgtgttggtcatgtctggtcgcggcaaaggcggaaagggactgggtaaaggaggcgctaagcgtcaccgtaaggtcctgcgagataacatccagggcattaccaagcctgccatccggcgccttgctcgtcgcgggggtgtcaagcgcatttctggtctcatctacgaggagactcgcggggttctgaaggtgtttctggaaaacgtgattcgtgatgctgtgacttacacggagcacgccaaacgcaagacagtgacagcgatggatgtggtctacgcgctgaagagacagggacgcactctttacggcttcggcggctaatgctaccgcttaaacgactcagcatctcgacttcccaaatcaaaggcccttttcagggccgcccacagttttccgcaaaagagctcatgacttgttagacgattggttagtctctttataagttaat

SEQ ID NO: 3774 - DNA, 4204 bp, Homo sapiens
acgcaggcagtgatgtcacccagaccacaccccttcccccaatgccacttcagggggtactcagagtcagagacttggtctgaggggagcagaagcaatctgcagaggatggcggtccaggctcagccaggcatcaacttcaggaccctgagggatgaccgaaggccccgcccacccacccccaactcccccgaccccaccaggatctacagcctcaggacccccgtcccaatccttaccccttgccccatcaccatcttcatgcttacctccacccccatccgatccccatccaggcagaatccagttccacccctgcccggaacccagggtagtaccgttgccaggatgtgacgccactgacttgcgcattggaggtcagaagaccgcgagattctcgccctgagcaacgagcgacggcctgacgtcggcggagggaagccggcccaggctcggtgaggaggcaaggtaagacgctgagggaggactgaggcgggcctcacctcagacagagggcctcaaataatccagtgctgcctctgctgccgggcctgggccaccccgcaggggaagacttccaggctgggtcgccactacctcaccccgccgacccccgccgctttagccacggggaactctggggacagagcttaatgtggccagggcagggctggttagaagaggtcagggcccacgctgtggcaggaatcaaggtcaggaccccgagagggaactgagggcagcctaaccaccaccctcaccaccattcccgtcccccaacacccaaccccacccccatcccccattcccatccccacccccacccctatcctggcagaatccgggctttgcccctggtatcaagtcacggaagctccgggaatggcggccaggcacgtgagtcctgaggttcacatctacggctaagggagggaaggggttcggtatcgcgagtatggccgttgggaggcagcgaaagggcccaggcctcctggaagacagtggagtcctgaggggacccagcatgccaggacagggggcccactgtacccctgtctcaaaccgaggcaccttttcattcggctacgggaatcctagggatgcagacccacttcagcagggggttggggcccagccctgcgaggagtcatggggaggaagaagagggaggactgaggggaccttggagtccagatcagtggcaaccttgggctgggggatgctgggcacagtggccaaatgtgctctgtgctcattgcgccttcagggtgaccagagagttgagggctgtggtctgaagagtgggacttcaggtcagcagagggaggaatcccaggatctgcagggcccaaggtgtacccccaaggggcccctatgtggtggacagatgcagtggtcctaggatctgccaagcatccaggtgaagagactgagggaggattgagggtacccctgggacagaatgcggactgggggccccataaaaatctgccctgctcctgctgttacctcagagagcctgggcagggctgtcagctgaggtccctccattatcctaggatcactgatgtcagggaaggggaagccttggtctgagggggctgcactcagggcagtagagggaggctctcagaccctactaggagtggaggtgaggaccaagcagtctcctcacccagggtacatggacttcaataaatttggacatctctcgttgtcctttccgggaggacctgggaatgtatggccagatgtgggtcccctcatgtttttctgtaccatatcaggtatgtgagttcttgacatgagagattctcaggccagcagaagggagggattaggccctataaggagaaaggtgagggccctgagtgagcacagaggggatcctccaccccagtagagtggggacctcacagagtctggccaaccctcctgacagttctgggaatccgtggctgcgtttgctgtctgcacattgggggcccgtggattcctctcccaggaatcaggagctccaggaacaaggcagtgaggacttggtctgaggcagtgtcctcaggtcacagagtagagggggctcagatagtgccaacggtgaaggtttgccttggattcaaaccaagggccccacctgccccagaacacatggactccagagcgcctggcctcaccctcaatactttcagtcctgcagcctcagcatgcgctggccggatgtaccctgaggtgccctctcacttcctccttcaggttctgaggggacaggctgacctggaggaccagaggcccccggaggagcactgaaggagaagatctgtaagtaagcctttgttagagcctccaaggttccattcagtactcagctgaggtctctcacatgctccctctctccccaggccagtgggtctccattgcccagctcctgcccacactcccgcctgttgccctgaccagagtcatcatgcctcttgagcagaggagtcagcactgcaagcctgaagaaggccttgaggcccgaggagaggccctgggcctggtgggtgcgcaggctcctgctactgaggagcaggaggctgcctcctcctcttctactctagttgaagtcaccctgggggaggtgcctgctgccgagtcaccagatcctccccagagtcctcagggagcctccagcctccccactaccatgaactaccctctctggagccaatcctatgaggactccagcaaccaagaagaggaggggccaagcaccttccctgacctggagtccgagttccaagcagcactcagtaggaaggtggccgagttggttcattttctgctcctcaagtatcgagccagggagccggtcacaaaggcagaaatgctggggagtgtcgtcggaaattggcagtatttctttcctgtgatcttcagcaaagcttccagttccttgcagctggtctttggcatcgagctgatggaagtggaccccatcggccacttgtacatctttgccacctgcctgggcctctcctacgatggcctgctgggtgacaatcagatcatgcccaaggcaggcctcctgataatcgtcctggccataatcgcaagagagggcgactgtgcccctgaggagaaaatctgggaggagctgagtgtgttagaggtgtttgaggggagggaagacagtatcttgggggatcccaagaagctgctcacccaacatttcgtgcaggaaaactacctggagtaccggcaggtccccggcagtgatcctgcatgttatgaattcctgtggggtccaagggccctcgttgaaaccagctatgtgaaagtcctgcaccatatggtaaagatcagtggaggacctcacatttcctacccacccctgcatgagtgggttttgagagagggggaagagtgagtctgagcacgagttgcagccagggccagtgggagggggtctgggccagtgcaccttccggggccgcatcccttagtttccactgcctcctgtgacgtgaggcccattcttcactctttgaagcgagcagtcagcattcttagtagtgggtttctgttctgttggatgactttgagattattctttgtttcctgttggagttgttcaaatgttccttttaacggatggttgaatgagcgtcagcatccaggtttatgaatgacagtagtcacacatagtgctgtttatatagtttaggagtaagagtcttgttttttactcaaattgggaaatccattccattttgtgaattgtgacataataatagcagtggtaaaagtatttgcttaaaattgtgagcgaattagcaataacatacatgagataactcaagaaatcaaaagatagttgattcttgccttgtacctcaatctattctgtaaaattaaacaaatatgcaaaccaggatttccttgacttctttgagaatgcaagcgaaattaaatctgaataaataattcttcctcttcactggctcgtttcttttccgttcactcagcatctgctctgtgggaggccctgggttagtagtggggatgctaaggtaagccagactcacgcctacccatagggctgtagagcctaggacctgcagtcatataattaaggtggtgagaagtcctgtaagatgtagaggaaatgtaagagaggggtgagggtgtggcgctccgggtgagagtagtggagtgtcagtgc

SEQ ID NO: 3775 - DNA, 850 bp, Homo sapiens
gggcctggagctgcacccgcttctgggtggacgcacttggcgagcggcgcgggatgcagacggctgcgaggcgctgggcacagttgctgtcccctttgacgatgatgacaagattgttgggggctacacctgtgagaattctctcccctaccaggtgtccctgaattctggctcccacttctgcggtggctccctcatcagcgaacagtgggtggtatcagcagctcactgctacaagacccgcatccaggtgagactgggagagcacaacatcaaagtcctggaggggaatgagcagttcatcaatgcggccaagatcatccgccaccctaaatacaacagggacactctggacaatgacatcatgctgatcaaactctcctcacctgccgtcatcaatgcccgcgtgtccaccatctctctgcccaccgcccctccagctgctggcactgagtgcctcatctccggctggggcaacactctgagctttggtgctgactacccagacgagctgaagtgcctggatgctccggtgctgacccaggctgagtgtaaagcctcctaccctggaaagattaccaacagcatgttctgtgtgggcttccttgagggaggcaaggattcctgccagcgtgactctggtggccctgtggtctgcaacggacagctccaaggagttgtctcctggggccatggctgtgcctggaagaacaggcctggagtctacaccaaggtctacaactatgtggactggattaaggacaccatcgctgccaacagctaaagcccccggtccctctgcagtctctataccaataaagtggccctgctctcaaaaaaaaaaaaaaaa

SEQ ID NO: 3776 - DNA, 141 bp, Homo sapiens
aagatcgcggactttggttttaacaggatttctctggctcctgtgttgattgagggggcggggggcagtatacagcagggagaactttgggaaactcttgaaattattgaagtaagagacatggacgtctgggcgttcgga

SEQ ID NO: 3777 - DNA, 1539 bp, Homo sapiens
atggacctcaaggaaagccccagtgagggcagcctgcaaccttctagcatccagatctttgccaacacctccaccctccatggcatccgccacatcttcgtgtatgggccgctgaccatccggcgtgtgctgtgggcagtggccttcgtgggctctctgggcctgctgctggtggagagctctgagagggtgtcctactacttctcctaccagcatgtcactaaggtggacgaagtggtggctcaaagcctggtcttcccagctgtgaccctctgtaacctcaatggcttccggttctccaggctcaccaccaacgacctgtaccatgctggggagctgctggccctgctggatgtcaacctgcagatcccggacccccatctggctgacccctccgtgctggaggccctgcggcagaaggccaacttcaagcactacaaacccaagcagttcagcatgctggagttcctgcaccgtgtgggccatgacctgaaggatatgatgctctactgcaagttcaaagggcaggagtgcggccaccaagacttcaccacagtgtttacaaaatatgggaagtgttacatgtttaactcaggcgaggatggcaaacctctgctcaccacggtcaagggggggacaggcaacgggctggagatcatgctggacattcagcaggatgagtacctgcccatctggggagagacagaggaaacgacatttgaagcaggagtgaaagttcagatccacagtcagtctgagccacctttcatccaagagctgggctttggggtggctccagggttccagacctttgtggccacacaggagcagaggctcacatacctgcccccaccgtggggtgagtgccgatcctcagagatgggcctcgacttttttcctgtttacagcatcaccgcctgtaggattgactgtgagacccgctacattgtggaaaactgcaactgccgcatggttcacatgccaggggatgcccctttttgtacccctgagcagcacaaggagtgtgcagagcctgccctaggtctgttggcggaaaaggacagcaattactgtctctgcaggacaccctgcaacctaacccgctacaacaaagagctctccatggtgaagatccccagcaagacatcagccaagtaccttgagaagaaatttaacaaatcagaaaaatatatctcagagaacatccttgttctggatatattttttgaagctctcaattatgagacaattgaacagaagaaggcgtatgaagttgctgccttacttggtgatattggtggtcagatgggattgttcattggtgctagtatccttacaatactagagctctttgattatatttatgagctgatcaaagagaagctattagacctgcttggcaaagaggaggacgaagggagccacgatgagaatgtgagtacttgtgacacaatgccaaaccactctgaaaccatcagtcacgctgtgaacgtgcccctgcagacgaccctggggaccttggaggagattgcctgctga

SEQ ID NO: 3778 - DNA, 334 bp, Homo sapiens
ttttccacacttggccagtttattaaaggcagggagcttcggcagggtccaaaagggagaagttgggagatgccccctcctcagctccctccttccccaacaactcttctacagcccagcccccagggcccagaggcagggctggcgtcaggcagactgtactgcataaatacgtggaggccacagcccgaatcagcagcgtcagggggcagggaaactgggtttgggatgagaagtgggtggctctgggggcacgtcccccagtgcttgtccagagcccagggacccacagagccagagaggggaccagtgggccagcttggggtctggctac

SEQ ID NO: 3779 - DNA, 401 bp, Homo sapiens; identical to SEQ ID NO: 1158

SEQ ID NO: 3780 - DNA, 642 bp, Homo sapiens
tcgtgttcatgggagctcgttttcttttcctctaggcagagaagaggcgatggcggcgatggcatctctcggcgccctggcgctgctcctgctgtccagcctctcccgctgctcagccgaggcctgcctggagccccagatcaccccttcctactacaccacttctgacgctgtcatttccactgagaccgtcttcattgtggagatctccctgacatgcaagaacagggtccagaacatggctctctatgctgacgtcggtggaaaacaattccctgtcactcgaggccaggatgtggggcgttatcaggtgtcctggagcctggaccacaagagcgcccacgcaggcacctatgaggttagattcttcgacgaggagtcctacagcctcctcaggaaggctcagaggaataacgaggacatttccatcatcccgcctctgtttacagtcagcgtggaccatcggggcacttggaacgggccctgggtgtccactgaggtgctggctgcggcgatcggccttgtgatctactacttggccttcagtgcgaagagccacatccaggcctgagggcggcaccccagccctgcccttgcttccttcaataaacatcacaggacctgggactgcacaggaaaaaa

SEQ ID NO: 3781 - DNA, 1361 bp, Homo sapiens
cattcggggacgctctcagctctcgactcactgcccagcttccttcaaaatgtcaactgatctcgaaatcctgtgcaagctcagcttggagggtgctcactctacaccctcaggtgcatatgggtcagtcaaagcctacaccaactttgatgctgagggggatgctttgaacattgaaaggaccatcaggacaaaaggtgtgggtaagttcaccattgtcaacattttgaccaacagcaggaatgctcggagagaggatgttgcctttgcctagcagagaaggaccacaaaggaacttacatcagcactgaagtcagccttactggccacctggagacagtcattttgggcctattgaagacacctgctcagtatgatgcttctgagctaaaagcttccatgaaggggctgggaactgaggaggactccctcgttgagatcatctgctcaacaaccaaccaggagctccaggaaattaacagagtctacaaagaaatgtacaaaactgatctggagaaggacattatttcggacacatatggtgacttctgcaagctgatgtttgccctggcaaatgttagaagaccagaggatggctctgtcgttgattatgaactgattgaccaagatgcccgggatttctgtgatgctggagtgaagaggaaaagaactgatgttcccaagtggatcagcatgatgaccgagtagagcatgtcccacctccagaaagtatttgataggtacaagagctacagcccttatgacatgttggaaagcatcaagaaagaggttaaaggagacctggaaaatgctttcctgaacctggtccagtgcattcagaacaagcccctgtattttgctgattggctgtactactccatgaagggccagggggctcgagataaggtcctgatcagaatcatcgtctcccgcagtgaagtggacatgttgaaaattaggtctgaattcaagagaaagtatggcatgtccctgtactactatatccagcaagacactaagaacgactaccagaaagcactgctgtacctgtgtggtggagatgactgaagcccaacatagcttgagcttccagaaacggtgctccccacgcttccagctaacaggtctagaaaaccagcttgtggctaacagtccctgtggccgtccctgtgaagatgacattagcattgcccccaacctcattttagttgcgtaagcatagcctggctttcctgtctagtctctcctgtaagccaaagaaatgtacattccaagcagttggaagtgaaatctatgatgtgaaacactttgcctcctgtgtactgtgtcataaacagatgaataaactgaatttgtacttt

SEQ ID NO: 3782 - DNA, 409 bp, Homo sapiens
ttttttttaggtaaaacaggatgtaaagtttatatacaagaatataatgtttatctgaaatatttacagtgttggttaaagcaatatttttacaacttttaaaggtaaactactatgtatattacaggtaagctacaatgggtttaatttgcaaaagttaagtaagaaatgttttaaacaaggcttaaagtactcaagtcaattataaaatttatatcttttgccttttacttgaagaaatcatgctatagaaatggttaatgtgcttctaataaatggaagtattgtagctggaatgtgatacatgtaacagtttaagttcccattgaaggtataaaatgatgaattgttgtaagacttagacactgagtctcagtctggagctgatgaagatgttgagataacagcc

SEQ ID NO: 3783 - DNA, 449 bp, Homo sapiens
ttatttagaaagtatcatagtgtaaacaaacaaattgtaccactttgattttcttggaatacaagactcgtgatgcaaagctgaagttgtgtgtacaagactcttgacagttgtgcttctctaggaggttgggtttttttaaaaaaagaattatctgtgaaccatacgtgattaataaagatttcctttaaggcagaggctggtcgagatgctgctgttatcttctgcctcagacagacagtataagtggtcttgtttctaagattcctaccaccagttactttgggccaagtatccacatccccttgcgtatgggaggtgggtgaagagtgttggatgcaaagtggttattatgggaagtagctcgatggtaaaaggacaaacacctatctatcttagagcttaagcctgtatgtgcttattcccaagggagatagaggtgtttaatc

SEQ ID NO: 3784 - DNA, 214 bp, Homo sapiens
ttttgctttttaatacaacatttatttatttaattgttttgagatggaggtcttgtcatgttacccaggctggacttgaacttctgggctgaacctcctgagtagctgggactacagatgcgtaccaccacacccggcccggcatgatataaacacttaaacaaaaattttaataaggattagtttttgttcatagggagaagggcccatgagg

SEQ ID NO: 3785 - DNA, 468 bp, Homo sapiens
tcctctgtccacacaggtcagcccaaggccaccccctcggtcactctgttcctgccgtcctctgaggagctccaagccaacaaggccacactggtgtgtctcatgaatgacttctatctgggaatcttgacggtgacctggaaggcagatggtacccccatcacccagggcgtggagatgaccacgccctccaaacagagcaacagcaagtacatggccagcagctacctgagcctgacgcccgagcagtggaggtcccgcagaagctacagctgccaggtcatgcacgaagggagcactgcagagaagacggtggcccctgcagaatgttcataggttcccagcccccagcccacccacaggaggcctggagctgcaggatcccaggggaggggtctctctccccatcccaagtcatccagcccttctccctgcactcatgaaaccccaataaatatcctcattgac

SEQ ID NO: 3786 - DNA, 277 bp, Homo sapiens
ttttaaagtgcttctttttaatgaaacaaatccaagagatgtacagtcaggctcaagttgtgcagttcacaagcatggaggaaacagacagaacgacagcgttcaggacagtcagagctaacccaagacgaggctggacttgccgccaaggggatttcttctggatggcactggggccggggcaccgggctgggcacaggcgcacaggcacgggcttctcttcactctgccccaggctgcctggcaagtctgtgtccacattttcatgaatatcacc

SEQ ID NO: 3787 - DNA, 1157 bp, Homo sapiens
ccccagcggaggtgaaggacgtccttccccaggagccgactggccaatcacaggcaggaagatgaaggttctgtgggctgcgttgctggtcacattcctggcaggatgccaggccaaggtggagcaagcggtggagacagagccggagcccgagctgcgccagcagaccgagtggcagagcggccagcgctgggaactggcactgggtcgcttttgggattacctgcgctgggtgcagacactgtctgagcaggtgcaggaggagctgctcagctcccaagtcacccaagaactgagggcgctgatggacgagaccatgaaggagttgaaggcctacaaatcggaactggaggaacaactgaccccggtagcggaggagacgcgggcacggctgtccaaggagctgcagacggcgcaggcccggctgggcgcggacatggaggacgtgtgcggccgcctggtgcagtaccgcggcgaggtgcaggccatgctcggccagagcaccgaggagctgcgggtgcgcctcgcctcccacctgcgcaagctgcgtaagcggctcctccgcgatcccgatgacctgcagaagcgcctggcagtgtaccaggccggggcccgcgagggcgccgagcgcggcctcagcgccatccgcgagcgcctggggcccctggtggaacagggccgcgtgcgggccgccactgtgggctccctggccggccagccgctacaggagcgggcccaggcctggggcgagcggctgcgcgcgcggatggaggagatgggcagtcggacccgcgaccgcctggacgaggtgaaggagcaggtggcggaggtgcgcgccaagctggaggagcaggcccagcagatacgcctgcaggccgaggccttccaggcccgcctcaagagctggttcgagcccctggtggaagacatgcagcgccagtgggccgggctggtggagaaggtgcaggctgccgtgggcaccagcgccgcccctgtgcccagcgacaatcactgaacgccgaagcctgcagccatgcgaccccacgccaccccgtgcctcctgcctccgcgcagcctgcagcgggagaccctgtccccgccccagccgtcctcctggggtggaccctagtttaataaagattcaccaagtttcacgc

SEQ ID NO: 3788 - DNA, 511 bp, Homo sapiens
ttttttttttttttttttcaaggggaaactggggcagttttattgacgatggcaatgtacaagactccacacctaggtatgtgcacgaggtaaggcctgagctcaggccttatgatcctcctcaggacccttgggggcaaacttctcctgcagtttcttccacatgcctttatctatttccttaagctcttccaaggtgtctgtggacaggatcagcttgtactcttccaacgacaggccactgaagctggtgtctctggggcgagggtacttgtgtttgtagtagtttgaatggagtcgcgctaagtctcgtacatctgatcacaggcctcaggtctgcaacctgggtattctctccctcccgaaaggcctgtgctacccgctgtcgcaggtaagcgcccaagtcccggccccgtttggtctcgtccactggccattcctcacagagcttaagaaaacgccggtaccgtgggccgccatttgggccccgcgtgttcccgcccctcgtgcc

SEQ ID NO: 3789 - DNA, 6158 bp, Homo sapiens; identical to SEQ ID NO: 432
  misc_feature (1)..(6158): n=a,t,g or c

SEQ ID NO: 3790 - DNA, 468 bp, Homo sapiens; identical to SEQ ID NO: 3785

SEQ ID NO: 3791 - DNA, 541 bp, Homo sapiens
gtttattaggcagcagctgggaaatcagcggttagacttggccacacgctccagttcatctttcttcttgatggcataggaattggaggagcccttggagcattaatgagctcatctgcaaggcactcggcgatggtcttgatgttccggaaagcagcctcacgagcccctgtgcacagcagccagatggcctgattcactcgacgcagtggggacacatccacagcctgtcgtctcactgtaccggcccgcccaatgcgtgttgagtcttctcgggggccactgttgatgatagcattcaccaggacctgcagagggttctcaccagtgagcaggtggatgatctcaaaggcatgcttgacaattcgcacagtcatgagcttcttgccgttgttacgaccatgcatcatcatggagttagtaaggcgctccacgatgggacattgtgctttgcggaagcttggcagcataccgtccggcactgtggggcaggtacttggcatacttctccttcacagcaatgtaatcctgcagagaaata

SEQ ID NO: 3792 - DNA, 408 bp, Homo sapiens; identical to SEQ ID NO: 1022

SEQ ID NO: 3793 - DNA, 469 bp, Homo sapiens
  misc_feature (1)..(469): n=a,t,g or c
cataatattaagtagcccattaacctttccctttaaacaggccttttgatgttagttcttataccaaaaaaaaaaaaaaaaaacccaaaaccaaaaaacaaaccaacaatacatgaagatgtaagggaagagattaatgagatacaattcattaagtataaaaatatgttgtttcaaattcagaataatttaataactcttcgttatttcatatgtatctggaaatgggacagatacgtgtcctgatcctgtcacaagaggtagaattccagcatttggtacgacgttccaagacagggtcaaagtgacattcctgtttcccttgagaccatttccatcgtcaaagaaaaaatattttgttttcatatctttcagcagcagcttcggattatcacctctcaaaacaatcttgtcccataggacaacttggttcagagcattattttttggtgaatattcngctgataan

SEQ ID NO: 3794 - DNA, 381 bp, Homo sapiens
gctcttctggactaagtgttgattcatcaacatcaaccaatagtttatcaaagtattgaatatcatcaggttttaaaaatggaagatttccagatggctggtcattaacacttttcatagttcgatcttcagtttgcatgtggaaaccagtcataccacccaaaggtgttggagtagctgtcagctttcgagctggagttcgaataggaacataaccagctggaggaggaagtaccttatatccttctgggaacatagcatctaattcctcatcagaaagtgggcgatttctctcatcaatttctctttcccaccgccaagcctgaagctgttcaggagtcatactcattatgtgacctggagtaggggtagcatgttcat

SEQ ID NO: 3795 - DNA, 318 bp, Homo sapiens; identical to SEQ ID NO: 863

SEQ ID NO: 3796 - DNA, 207 bp, Homo sapiens
  misc_feature (1)..(207): n=a,t,g or c
tttttttttttttttttttttttttttttttttttttttttttttggcggaaggcagtcatagcaccatttattgtccaaagtacacacacctgagggcccctccccacacagggaaacaggagaaacaaatgacaacaaaacagattctttggaaccgagangggaaggggaacggggaggggagtttcttccttccctcagcttt

SEQ ID NO: 3797 - DNA, 239 bp, Homo sapiens
aagctagaaaaaggccaaaaagcaaaacctgagaaaacaatacgtgttgttttctcaggaaaagaaaaaccttcatgaccctactgaagagcattggagatcagcttccgctaagatgctagcttggccaagtctgttatgttcacctgaaaaagtcttagcagagaatttttgcattcccacccaaaagccctctcagccactcaaatgcctatcttctccagtctacaagttacatg

SEQ ID NO: 3798 - DNA, 1244 bp, Homo sapiens
atggaagccccagctcagcttctcttcctcctgctactctggctcccagataccaccggagaaattgtgttgacacagtctccagccaccctgtctttgtctccaggggaaagagccaccctctcctgcagggccagtcagagtgttggcagctacttagcctggtaccaacagaaacctggccaggctcccaggcccctcatctatgatgcatccaacagggccactggcatcccagccaggttcagtggcagtgggtctgggacagacttcactctcaccatcagcagcctagagcctgaagattttgcagtttattactgtcaacaccgtgacaattggcctccgggggccactttcggcggagggaccaaggtggagatcaaacataccaccggagaaattgtgttgacacagtctccagccaccctgtctttgtctccaggggaaagagccaccctctcctgcagggccagtcagagtgttggcagctacttagcctggtaccaacagaaacctggccaggctcccaggcccctcatctatgatgcatccaacagggccactggcatcccagccaggttcagtggcagtgggtctgggacagacttcactctcaccatcagcagcctagagcctgaagattttgcagtttattactgtcaacaccgtgacaattggcctccgggggccactttcggcggagggaccaaggtggagatcaaacgaactgtggctgcaccatctgtcttcatcttcccgccatctgatgagcagttgaaatctggaactgcctctgttgtgtgcctgctgaataacttctatcccagagaggccaaagtacagtggaaggtggataacgccctccaatcgggtaactcccaggagagtgtcacagagcaggacagcaaggacagcacctacagcctcagcagcaccctgacgctgagcaaagcagactacgagaaacacaaagtctacgcctgcgaagtcacccatcagggcctgagctcgcccgtcacaaagagcttcaacaggggagagtgttagagggagaagtgcccccacctgctcctcagttccagcctgaccccctcccatcctttggcctctgaccctttttccacaggggacctacccctattgcggtcctccagctcatctttcacctcacccccctcctcctccttggctttaattatgctaatgttggaggagaatgaataaataaagtgaatctttgc

SEQ ID NO: 3799 - DNA, 450 bp, Homo sapiens
tgagcgtgtccggcttcgaggagttccaccgggccgtggaacagcacaatggcaagaccattttcgcctactttacgggttctaaggacgccggggggaaaagctggtgccccgactgcgtgcaggctgaaccagtcgtacgagaggggctgaagcacattagtgaaggatgtgtgttcatctactgccaagtaggagaaaagccttattggaaagatccaaataatgacttcagaaaaaacttgaaagtaacagcagtgcctacactacttaagtatggaacacctcaaaaactggtagaatctgagtgtcttcaggccaacctggtggaaatgttgttctctgaagattaagattttaggatggcaatcatgtcttgatgtcctgatttgttctagtatcaataaactgtatacttgctttgaattcatgttagcaataaatgatgtt

SEQ ID NO: 3800 - DNA, 280 bp, Homo sapiens; identical to SEQ ID NO: 404

SEQ ID NO: 3801 - DNA, 154 bp, Homo sapiens
tttttttttttttttttttagagatggaatcgcaagaattcccaggccctctttttatttacagtgataccaaaccatccacttgcaaattctttggtctcccatcagctggaattaagtaggtactgtgtatctttgagatcatgtatttgtc

SEQ ID NO: 3802 - DNA, 524 bp, Homo sapiens
  misc_feature (1)..(524): n=a,t,g or c
tcatagaccaacattctttaatcacaaaggcacttgaggacccctacaaacccaaagtctctgccaagagtggccctgcagacgccccacctgccaccctccatccacccatccatccacacactcagagttcatcgtgacctgcagagggctccacactaggcttgatgaagatgccttccatggccttccacgtattgtgcgtgttggcactggggcatgccgtggacctcatgctgcccacggatggggcttccatactgctcacccgtgactgacaggaacacagaggtgcccacatgctnggaaggcacagcagcctcacgctcccagtngctgttccagagcagcgcactgtccataaggttccaggtcgtcgccctcgccgtcttccccaaaggcactcacctcctggttgttggacagcggcgagggaagtggtgcgtgtgcaggttctttgnccgtaagcacatgcgtganccttcaccgnctgcccgcagcgcaccggggaacccgcgcgggaa

SEQ ID NO: 3803 - DNA, 425 bp, Homo sapiens
  misc_feature (1)..(425): n=a,t,g or c
ccaggncctctttttatttacagngataccaaaccatccacttgcaaattctttggnctcccatcagctggaattaagtaggnactgtgtanctttgagancangtatttgtctccactttggnggatacaagaaaggaaggcacgaacagctgaaaaagaagggtatcacaccgctccagctggaatccagcaggaacctctgagcatgccacagctgaacacttaaaagaggaaagaaggacagctgctcttcatttattttgaaagcaaattcatttgaaagtgcataaatgggncatcataaggtcaaacgtatcaattaggnccttcaacctaggggaacaaaattttttttttcnatttaataatacaccncactgaaattatttgccnatggatnccccaaggtttggggacaatagg

SEQ ID NO: 3804 - DNA, 451 bp, Homo sapiens
tttttcgttaaaggtatttttattgctagtacaagattgcaggatctaggcaaataatataacaattaaatgtgcaaatctcatgaaggtaaactacctttctgttctgtaatatttacccaaatagtcaaggctcagacttgttaaactgtggagttactaaagaaggggggattttccaaattgtagaaacaagagtagtcagattttcccatccctactagctttctaggttaaattcaatgatgtgaaaacaagcatagggtagagtccatatgatattcatacaggaagaatgtccactggggaagctctttcggccctcattcaccacgtccttatcccctgtacacatcaagtcagaatgggctagccatcagggaagcagcggtagaagaaatctgggcgtggctccctacgatcagttttattgtgttggtaaagacgccat

SEQ ID NO: 3805 - DNA, 126 bp, Homo sapiens
acttttggtttcatattttttcagttaatttcagtaaaaacataatatataaaaggcattgccaccattttcccctcctgggggtgatccatcaagccagtgtgggctgctccagtggttcatagc

SEQ ID NO: 3806 - DNA, 147 bp, Homo sapiens
ctgcacatatcgcatgatgagctatgaaccactggagcagcccacactggcttgatggatcacccccaggaggggaaaatggtggcaatgccttttatatattatgtttttactgaaattaactgaaaaaatatgaaaccaaaagta

SEQ ID NO: 3807 - DNA, 269 bp, Homo sapiens; identical to SEQ ID NO: 913

SEQ ID NO: 3808 - DNA, 1799 bp, Homo sapiens
cctctctgtgctgggttcctccagtgtagaggagaggcaggtacagcctgtcctcctggggacatggcatgagggccgcgtcctcacagcgcattctgtgttccagcatccccgaccagccccaaggtcttcccgctgagcctcgacagcaccccccaagatgggaacgtggtcgtcgcatgcctggtccagggcttcttcccccaggagccactcagtgtgacctggagcgaaagcggacagaacgtgaccgccagaaacttcccacctagccaggatgcctccggggacctgtacaccacgagcagccagctgaccctgccggccacacagtgcccagacggcaagtccgtgacatgccacgtgaagcactacacgaattccagccaggatgtgactgtgccctgccgaggtcagagggcaggctggggagtggggcggggccaccccgtcctgccctgacactgcgcctgcacccgtgttccccacagggagccgccccttcactcacaccagagtggaccgcgggccgagccccaggaggtggtggtggacaggccaggaggggcgaggcgggggcacggggaagggcgttctgaccagctcaggccatctctccactccagttcccccacctcccccatgctgccacccccgactgtcgctgcaccgaccggccctcgaggacctgctcttaggttcagaagcgaacctcacgtgcacactgaccggcctgagagatgcctctggtgccaccttcacctggacgccctcaagtgggaagagcgctgttcaaggaccacctgagcgtgacctctgtggctgctacagcgtgtccagtgtcctgcctggctgtgcccagccatggaaccatggggagaccttcacctgcactgctgcccaccccgagttgaagaccccactaaccgccaacatcacaaaatccggtgggtccagaccctgctcggggccctgctcagtgctctggtttgcaaagcatattcccggcctgcctcctccctcccaatcctgggctccagtgctcatgccaagtacagagggaaactgaggcaggctgaggggccaggacacagcccagggtgcccaccagagcagaggggctctctcatcccctgcccagccccctgacctggctctctaccctccaggaaacacattccggcccgaggtccacctgctgccgccgccgtcggaggagctggccctgaacgagctggtgacgctgacgtgcctggcacgtggcttcagccccaaggatgtgctggttcgctggctgcaggggtcacaggagctgccccgcgagaagtacctgacttgggcatcccggcaggagcccagccagggcaccaccaccttcgctgtgaccagcatactgcgcgtggcagccgaggactggaagaagggggacaccttctcctgcatggtgggccacgaggccctgccgctggccttcacacagaagaccatcgaccgcttggcgggtaaacccacccatgtcaatgtgtctgttgtcatggcggaggtggacggcacctgctactgagccgcccgcctgtccccacccctgaataaactccatgctcccccaagcagccccacgcttccatccggcgcctgtctgtccatcctcagggtctcagcacttgggaaagggccagggcatggacagggaagaataccccctgccctgagcctcggggggcccctggcacccccatgagactttccaccctggtgtgagtgtgagttgtgagtgtgagagtgtgtggtgcaggagg

SEQ ID NO: 3809 - DNA, 6728 bp, Homo sapiens; identical to SEQ ID NO: 521

SEQ ID NO: 3810 - DNA, 1089 bp, Homo sapiens
  misc_feature (1)..(1089): n=a,t,g or c
cctggacctcctgtgcaagaacatgaaacanctgtggttcttccttctcctggtggcagctcccagatgggtcctgtcccaggtgcacctgcaggagtcgggcccaggactggggaagcctccagagctcaaaaccccacttggtgacacaactcacacatgcccacggtgcccagagcccaaatcttgtgacacacctcccccgtgcccacggtgcccagagcccaaatcttgtgacacacctcccccatgcccacggtgcccagagcccaaatcttgtgacacacctcccccgtgcccnnngtgcccagcacctgaactcttgggaggaccgtcagtcttcctcttccccccaaaacccaaggatacccttatgatttcccggacccctgaggtcacgtgcgtggtggtggacgtgagccacgaagacccnnnngtccagttcaagtggtacgtggacggcgtggaggtgcataatgccaagacaaagctgcgggaggagcagtacaacagcacgttccgtgtggtcagcgtcctcaccgtcctgcaccaggactggctgaacggcaaggagtacaagtgcaaggtctccaacaaagccctcccagcccccatcgagaaaaccatctccaaagccaaaggacagcccnnnnnnnnnnnnnnnnnnnnnnnnnnnnnnnnnnnngaggagatgaccaagaaccaagtcagcctgacctgcctggtcaaaggcttctaccccagcgacatcgccgtggagtgggagagcaatgggcagccggagaacaactacaacaccacgcctcccatgctggactccgacggctccttcttcctctacagcaagctcaccgtggacaagagcaggtggcagcaggggaacatcttctcatgctccgtgatgcatgaggctctgcacaaccgctacacgcagaagagcctctccctgtctccgggtaaatgagtgccatggccggcaagcccccgctccccgggctctcggggtcgcgcgaggatgcttggcacgtaccccgtgtacatacttcccaggcacccagcatggaaataaagcacccagcgctgccctgg

SEQ ID NO: 3811 - DNA, 148 bp, Homo sapiens
gttttgcaaccacccatcaataaactttcttttttattattaagtgggggcagggtttctgttcttgcaactgagtcctaacagaaaacaatggtttcgctgaccacacggagagctgaggacaggacaaaaaggcatgagacagctg

SEQ ID NO: 3812 - DNA, 390 bp, Homo sapiens; identical to SEQ ID NO: 987
  misc_feature (1)..(390): n=a,t,g or c

SEQ ID NO: 3813 - DNA, 5416 bp, Homo sapiens; identical to SEQ ID NO: 429

SEQ ID NO: 3814 - DNA, 272 bp, Homo sapiens; identical to SEQ ID NO: 845

SEQ ID NO: 3815 - DNA, 915 bp, Homo sapiens
ctgatttgcatggatggactctccccctctcagagtatgaagagagggagagatctgggggaagctcagcttcagctgtgggtagagaagacaggactcaggacaatctccagcatggccagcttccctctcctcctcaccctcctcactcactgtgcagggtcctgggcccagtctgtgctgactcagccaccctcagcgtctgggacccccgggcagagggtcaccatctcttgttctggaagccgctccaacgtcggaagtaataatgttaactggtaccagcagctcccaggaacggcccccaaactcctcatctatagtaataatcagcggccctcaggggtccctgaccgattctctggctccaagtctggcacctcagcctccctggccatcagtgggctccagtctgaggatgaggctgattattactgtgcaacatgggatgacagtactgtggtcttcggcggagggaccaagctgaccgtccctggtcagcccaaggctgccccctcggtcactctgttcccgccctcctctgaggagcttcaagccaacaaggccacactggtgtgtctcataagtgacttctacccgggagccgtgacagtggcctggaaggcagatagcagccccgtcaaggcgggagtggagaccaccacaccctccaaacaaagcaacaacaagtacgcggccagcagctatctgagcctgacgcctgagcagtggaagtcccacagaagctacagctgccaggtcacgcatgaagggagcaccgtggagaagacagtggcccctacagaatgttcataggttctcaaccctcaccccccaccacgggagactagagctgcaggatcccaggggaggggtctctcctcccaccccaaggcatcaagcccttctccctgc

SEQ ID NO: 3816 - DNA, 1599 bp, Homo sapiens; identical to SEQ ID NO: 1010

SEQ ID NO: 3817 - DNA, 402 bp, Homo sapiens
tttttttgattctattacttttattaaatagtgggtttccacacatggctttttaaataatccaggcaggagaagagaggagggcacacttggaactcccctccccacaatacgtgattatttacattttagtaattggacaatcccggctcaggaggaggttgcaagaatctgcaaaagttggagggagcgccccaggagaacaaacagcaagccttatttcccctagcccatcccccaaaaaaccatccatcccatcctagtgtctggtggtgtccggtggtgtccatcttccattccttcccaaattatggaagtaaggttcttctcaccagaataagagcacttgggataacagagtagggtcccctcacccaaaaaaaaaaaaaaaaaagaagaagc

SEQ ID NO: 3818 - DNA, 1201 bp, Homo sapiens; identical to SEQ ID NO: 409

SEQ ID NO: 3819 - DNA, 412 bp, Homo sapiens; identical to SEQ ID NO: 598

SEQ ID NO: 3820 - DNA, 370 bp, Homo sapiens; identical to SEQ ID NO: 989
  misc_feature (1)..(370): n=a,t,g or c

SEQ ID NO: 3821 - DNA, 313 bp, Homo sapiens; identical to SEQ ID NO: 588
  misc_feature (1)..(313): n=a,t,g or c

SEQ ID NO: 3822 - DNA, 445 bp, Homo sapiens; identical to SEQ ID NO: 861

SEQ ID NO: 3823 - DNA, 434 bp, Homo sapiens
ttttttttttaagttgaacagaacattttatttctcagcaattctatgcgtacaaattaaacatgagatgaatagagactttattgagaaagcaagagaaaattcctatcaaccccaaggaggactcaaagtgaggctggaagaggacttagaagagtatgaaagtactctaagattttatctaagttgccttttctgggtgggaaagtttaaccttagtgactaaggacatcacatatgaagaatgtttaagttggaggtggcaacgtgaattgcaaacagggcctgcttcagtgactgtgtgcctgtagtcccagctactcgggagtctgtgtgaggccaggggtgccagcgcaccagctagatgctctgtaacttctaggccccattttcccctctgaaaataagagggttggatcaaacgatctctgggg

SEQ ID NO: 3824 - DNA, 374 bp, Homo sapiens; identical to SEQ ID NO: 849

SEQ ID NO: 3825 - DNA, 443 bp, Homo sapiens
ctgattacctacaatggtcaattttattacaaagaactgtatcaaaatatacaagtctgtttaagaacaaccaagaaatgcagctgtttaagggacaaatgagaatcaaccgttagagagcaggcagcctctccccgccgctgtccactgcaggagacggcatcctcagggccacattttccacgggacatccttctgaataatttaaagggtaagtccggcacattacaggtcttcgcgggagggcagctgtgtcgggctttctccttctgtggcttcagctcttgccggcggacaacaggcatcttccgtttcttcgaagccgtcagacacacacagacgtagctccctggagtattgtagcagttttcgtttttcctcacacaggttttttctgctagtgagcactcgtccacatctgcacactgtccgtgctccctcgc

SEQ ID NO: 3826 - DNA, 471 bp, Homo sapiens
  misc_feature (1)..(471): n=a,t,g or c
tttctattttatttattttattttttatttccttccctcataccttgcccattccctctgaatattaggtgtgatgtcaacagcatgttagaaggatcaatgggaaggcaatgattgaaaacatttcaatgaaccttaatagtgttcctttgaggagcacccaggagaatatctggtcatagatctttttttaaatgcagttttataaaaccctaacagcggtgatatcattagactgtatgaatcagttttattacctagtgtacaagtgtcagtcatgtatcattatatagtctgttgatctttccatttgcaaaanattaatagttttcccccacanatgtacaaagttggtatgcttccagtcttcctttaatggtttatagtcattcccaaaggtaacattccaattttacactttcacatacattggttaaggaatcantggggtttttccccctttttncccct

SEQ ID NO: 3827 - DNA, 154 bp, Homo sapiens; identical to SEQ ID NO: 3801

SEQ ID NO: 3828 - DNA, 187 bp, Homo sapiens
  misc_feature (1)..(187): n=a,t,g or c
ttattgagggtttattgagtgcagggagaagggtcttgatgccttggggtgggaggagagacccctccccgggatcctgcagtctctagtctcccgtggtggggggtgagggatgagaacccatgaacattctgtaggggccactntcttctccacggtgctcccttcatgtcgtgacctgggcagc

SEQ ID NO: 3829 - DNA, 3308 bp, Homo sapiens; identical to SEQ ID NO: 1011

SEQ ID NO: 3830 - DNA, 445 bp, Homo sapiens
  misc_feature (1)..(445): n=a,t,g or c
ttctggttgtcaatgaggatatttattggggtttcatgagtgcagggagaagggctggatgacttgggatggggagagagacccctcccctgggatccctgcagctccagggtnccgtgggtngggttagagttgggaacctatgaacattctntaggggccactntcttctccacggtgctcccttcatgcgtgacctggcanctntagcttctgtgggacttccactgctcgggcgtcaggctcaggtagctgctggccgcgtacttnttgttgctctgtttggagggtttggtggtctccactcccnccttnacggggctgccatctgccttccagggcactntcacagctcccgggtagaagtcactgatcagacacactagtgtggccttgttggcttggagctcctcagagganggcgggaacagagttacagtgggga

SEQ ID NO: 3831 - DNA, 1977 bp, Homo sapiens
  misc_feature (1)..(1977): n=a,t,g or c
ttgcaccaggcactgctgcacaacaagatacgctcgccacagtccttctttgacaccacaccatcaggccgcatcctgaactgcttctccaaggacatctatgtcgccttgatgaggttctggcccctgtcaccntcancgccgctcaattacttcttcaacgccatctccactcttgtggtcatcatggccagcacgacggatcttnacttgtgggtnanntgcccctgggtngtgctcttacaccttagtgcagcgcttctatgcagccacatcacggcaactgaagcggctggaatcagtcagccgtcacctatctactcccacttttcggagacagtgactggtgccagtgtcatccgggcctacaaccgcagccgggattttgagatcatcagtgatactaaggtggatgccaaccagagaagctgctacccctacatcatctccaaccggtggctgagcatcggagtggagttcgtggggaactgcgtggtgctctttgctgcactatttgccgtcatcgggaggagcagcctgaacccggggctggtgggctttctgtgtcctactccttgcaggtgacatttgctctgaactggatgatacgaatgatgtcagatttggaatctaacatcgtggctgtggagagggtcaaggagtactccaagacagagacagaggcgccctgggtggtggaacagccgccctcccgaaggttggccccacgtggggaggtggagttccggaattattctgtgcgctaccggccgggcctagacctggtgctgagagacctgagtctgcatgtgcacggtggcgagaaggtggggatcgtgggccgcactggggctggcaagtcttccatgaccctttgcctgttccgcatcctggaggcggcaaagggtgaaatccgcattgatggcctcaatgtggcagacatcggcctccatgacctgcgctctcagctgaccatcatcccgcaggaccccatcctgttctcggggaccctgcgcatgaacctggaccccttcggcagctactcagaggaggacatttggtgggctttggagctgtcccacctgcacacgtttgtgagctcccagccggcagctgggagcttccagtgctcagagggcggggagaatctcagcgtggnccagaggagctcgtgtgccatggcccgagccctgctccgcaagagccgcatcctggttttagacgaggccacagctgccatcgacctggagactgacaacctcatccaggctaccatccgcacccagtttgatacctgcactgtcctgaccatcgcacaccggcttaacactagcatggactacaccagggtcctggtcctggacaaaggagtagtagctgagtttgattctccagccaacctcattgcagctagaggcatcttctacgggatggccagagatgctggacttgcctaaaatatatctgagatttcctcctggcctttcctggttttcatcaggaaggaaatgacaccaaatatgtccgcagaatggacttgatagcaaacactgggggcaccttaagatttttgcacctgtaaagtgccttacagggtaactgtgctgaatgctttagatgaggaaaagatccccaagtggtgaatgacacgcctaaggtcacagctagtttgagccagttagactagtcccgggtctcccgaatcccaactgagtgttatttgcacactgcactgttttcaaataacgattttatgaaatgacctctgtcctccctctgatttttcatattttctaaagtttcgtttctgttttttaataaaaagctttttccccctggaacagaagacagctgctgggtcaggccacccctaggaactcagtcctgtactctggggtgctgcctgaatccattaaaaatgggagtactgatgaaataaaactacatggtcaacagtaaaaaaaaaaaaaaaaaaaa

SEQ ID NO: 3832 - DNA, 323 bp, Homo sapiens
atgtaaactatcaaatgtttatttaaatttccatttaaaatattttcaagtaaaatatgtacaaaaatggttataaaatggttgaagcaactagaagcgtgacaggtataatacatataaatacaaccaaaattcaattcaatgcaaagttgaatgacatcatattgcaccaaaatttattccatacaaaagcacatgcatcaagagtttccataagatgaaaacaaacacacttacttcatagcatcttaccacttacttacacaaatagcccataaacaccatctggcattgtgattgcagtaccagaactctccccagag

SEQ ID NO: 3833 - DNA, 382 bp, Homo sapiens
ggtcagcccaagactaccccgtcggtcattctgttcctgccgtcctgtgaggagccccaagccaacaaggccacactggtgtgtctcatgaataactttatccgggaatcttgatggtgacctggaaggcagatggtaccctcatcacccagagcgtggagaagaccacgccctccaaacagagcaacaacaagtacgtggccagcagctacctgagcctgacgcccgagcagtggaggtcccgcagaagctacagctgccaggttatgcaagaagggagcaccgtggagaagtcagtggcccctgcagaatgttcataggttccagcccccaccccaccacaggggcctggagctgcaggatcccaggggaggggtctctc

SEQ ID NO: 3834 - DNA, 337 bp, Homo sapiens; identical to SEQ ID NO: 930

SEQ ID NO: 3835 - DNA, 159 bp, Homo sapiens
ccggtaaacccaccctgtacaacgtgtccctggtcatgtccgacacagctggcacctgctactgaccctgctggcctacccacaggctcggggcggctggcgcctgtgtgtgcatgcaaactaaccgtgcaacgggtgagatgtgactcataatagata

SEQ ID NO: 3836 - DNA, 620 bp, Homo sapiens
  misc_feature (1)..(620): n=a,t,g or c
ctggttgacaaagagggtatttattgagggtttactgggtacanggagaagggctggatggcttgggatgcagagagagacccttcccctgggatcctgcagctccaggcccctttgggtggggtcggggctgggaacctatgaacattctgcaggggccaccgtcttctccacggtgctcccttcgtgcatgacctggcagctgtagcttctgcgggacctccactgctcgggcgtcaggctcaggtagctgctggccgcgtacttgttgttgctctgtttggagggcgtggtcatctccacgccctgggtgatgggggtaccatctgccttccaggtcaccgtcaagattcccggataaaagtcattcatgagacacaccagtgtagccttgttggcttggagctcctcagaggacggcgggaacagagtgaccgagggggtggccttggntgacttaaaacggtgagctgggtcccgctgccaaacacatgcgtcactgagttatgcttggattgaaaccccggggccancacttggggcagtccaggagccgccttgaacaggaacctgcccaccggttcctaagcttgaccgctgnttctccagggtccaggncc

SEQ ID NO: 3837 - DNA, 402 bp, Homo sapiens; identical to SEQ ID NO: 3323

SEQ ID NO: 3838 - DNA, 531 bp, Homo sapiens; identical to SEQ ID NO: 3127
  misc_feature (1)..(531): n=a,t,g or c

SEQ ID NO: 3839 - DNA, 448 bp, Homo sapiens; identical to SEQ ID NO: 1666
  misc_feature (1)..(448): n=a,t,g or c

SEQ ID NO: 3840 - DNA, 567 bp, Homo sapiens; identical to SEQ ID NO: 1667
  misc_feature (1)..(567): n=a,t,g or c

SEQ ID NO: 3841 - DNA, 423 bp, Homo sapiens; identical to SEQ ID NO: 2073

SEQ ID NO: 3842 - DNA, 440 bp, Homo sapiens
attcggaacgaggattatttcatataccttcaagccataaagatattgtgttcacttttctgcttgaggctaaggcactgtatcccaggcctcccaatgttcccgagccaggaactctgggccccatggagttatgagctcccttggaattttgagccaagctttaagcaagtctggactcctgagacctcctgggtctagtcagtaaaattctgcaactctaggaattctaagatcccattggaaggaatgctctacctcacagaactctgaaccctacagaaatatgggcctgctgccatttcctgaagaccggggcatcggggtggggtgataaaggatacaacctgcacagggggaagttattaaagaggctgcaaagtccagccaccctgaagatactccccagtgctcccctcctgctaaagaaccagttaccc

SEQ ID NO: 3843 - DNA, 579 bp, Homo sapiens
cagtggatcaggacaagtggtattggacaggagatgtcgccacaatgaatgagcagggcttctgcaagatcgtgggccgctctaaggatatgatcatccggggtggtgagaacatctaccccgcagagctcgaggacttctttcacacacacccgaagtgcaggaagtgcaggtggtgggagtgaaggacgatcggatgggggaagagatttgtgcctgcattcggctgaaggacggggaggagaccacggtggaggagataaaagctttctgcaaagggaagatctctcacttcaagattccgaagtacatcgtgtttgtcacaaactaccccctcaccatttcaggaaagatccagaaattcaaacttcgagagcagatggaacgacatctaaatctgtgaataaagcagcaggcctgtcctggccggttggcttgactctctcctgtcagaatgcaacctggctttatgcacctagatgtccccagcacccagttctgagccaggcacatcaaatgtcaaggaattgactgaacgaactaagagctcctggatgggtccgggaactcgcctgggca

SEQ ID NO: 3844 - DNA, 586 bp, Homo sapiens; identical to SEQ ID NO: 3191

SEQ ID NO: 3845 - DNA, 190 bp, Homo sapiens; identical to SEQ ID NO: 3197

SEQ ID NO: 3846 - DNA, 6289 bp, Homo sapiens
acgacctatggtctagtaggggttctgggggctggggcgtgtaccgctcccctagctttggagctggggaagggctcctgcggtcccaggctcgaacccgtgccaaaggacctggaggcacctctagggcattgagggatggaggatttgagcctgaaagagtcgacagcggaagtccctgtcaaatccagatatcgcctcagagaccctgacgcttctcagtttcctgcgctcagacctttcagagctgagggtccgaaaacctggtgggagctccggggaccgtggaagcaaccccctagatggcagagactcaccatccgcaggtggccctgtggggcaacttgaacccatacccatcccagccccagcatcacctggcacgcgccccacactcaaggacttgacagccactctgcggagagcaaagtcattcacctgctctgagaagcccatggcccgccgcctgccccgcaccagtgctctgaagtccagctcctccgagctcctgctcacaggccctggtgccgaggaggatccgctgcccctcatcgtccaggaccaatatgtgcaggaggcccgccaggtttttgagaagatccagcgcatgggtgcccaacaagatgatggaagcgatgccccccctggaagccctgactgggcaggggatgtgacccgagggcagcggtcccaggaggagctctcaggccctgagtccagtctgacagatgaaggcattggggcagaccctgagcctcctgttgcagcattttgcggcctgggtaccacagggatgtggcgacctctttcctcatcctcggcccagacgaaccaccatggccctgggactgaggacagtctgggcgggtgggccctggtgtcgcctgagacccctcccacaccaggtgccctccgccgacgacgcaaagtcccaccttcaggttctggtgggagcgaatttagcaatggggaggcaggggaggcctacaggtccctgagtgacccaattcctcagcgccaccgggctgccacctctgaagagcctactgggttctctgtggacagcaacctcctgggctcactgagccccaagacagggctccctgccacctcagccatggatgagggcttgaccagtggtcacagtgactggtctgtgggcagtgaagagagcaagggatatcaggaggttattcagagcatagttcaggggcctggcaccctggggcgtgtggtggacgacaggattgctggcaaagcccccaagaagaaatccctgagtgaccccagccgccgtggggagctggctgggcctggattcgagggccctggaggggagcccatccgagaagttgagcccatgctgcctccatccagcagcgagcccatccttgtagagcagcgggcagagccagaagaacctggtgccaccaggagccgggcacagtctgaaagggccctacctgaggctctgcctccccctgccactgcccaccgaaactttcaccttgaccccaagctggctgacattctgtccccgaggctaatccgccgaggctccaagaagcgcccagctcggagtagtcaccaggagcttcggagagacgagggcagtcaggaccagactggcagcctgtctcgggcccggccctcctccagacacgttcgccatgccagtgtgcccgccacatttatgcctattgtggtgcctgagccaccaacttctgttggtccccctgtggctgtgccagaacccataggcttccctacccgagcccatcccacgttgcaggcaccatcgctcgaggacgtcaccaagcagtacatgctgaacctgcactccggtgaggtccctgccccagtgccagtggacatgccctgcttgcctctggctgcaccgccctctgctgaggccaagccccctgaggcagctcggcctgcagatgagcctacccctgccagcaagtgctgcagcaagccacaggtggacatgcggaagcacgtggccatgaccctgctggacacagagcagtcgtatgtggagtcgctgcgcaccctgatgcagggctacatgcagccgctgaagcagccagagaactccgtgctctgtgacccttcactggtggacgagatcttcgaccagatccccgagctcctggagcaccacgagcaattcctggagcaggttcggcactgcatgcagacctggcatgcccagcagaaggtgggagccctgctcgtccagtcgttctccaaggatgtcctagtaaacatctattctgcctatatcgataacttcctcaatgcaaaggatgctgtgcgtgtggccaaggaggcgaggcctgcctttctcaagttcctagagcaaagcatgcgtgagaacaaggagaagcaggcgctgtctgacctcatgatcaagcctgtgcagcggatcccacgctacgagcttctggtgaaggacctcctgaagcatacacctgaggaccacccggaccatccactcctgctggaggcgcagcggaacatcaagcaggtggctgagcgcatcaacaagggtgtgcggagtgccgaggaggcggagcgccatgcccgtgtgctgcaggagatagaggctcacatcgagggcatggaggatctccaggcccctctgcggcggttcctgagacaggagatggtcattgaagtgaaggcgatcggtggcaagaaggaccggtctctcttcctgttcacggacctcatcgtctgcaccactctgaagcgaaagtcaggctccctgcggcgcagctccatgagcctgtacacggcagccagtgtcattgacacagccagcaagtacaagatgctgtggaagctgccgctggaagacgcagacatcatcaaaggggcatcccaagccaccaatcgggagaacatccagaaggccatcagccgccttgatgaggacctcaccaccctgggccaaatgagcaagctctctgagagccttggtttcccccaccagagcctggacgatgcactgcgggacctctcagctgccatgcaccgggacctgtcggagaagcaggcgctgtgctacgcgctttccttcccgccaaccaagctggagctgtgcgccactcggcccgagggcaccgactcctacatttttgagttccctcaccctgacgcccgccttggttttgaacaggccttcgatgaggccaagaggaagctggcatccagcaaaagctgtctagaccctgagttcctgaaggccatccccatcatgaaaacccgcagtggcatgcagttctcctgtgcggctcccaccctgaacagctgcccggagccctcgcctgaggtatgggtctgcaacagcgacggctacgtgggccaggtgtgcctgctgagcctgcgcgccgagccggacgtggaggcctgcatcgccgtctgttccgcccgcatcctctgcatcggggcggtgcccgggctgcagcctcgctgccaccgggagcctcctccgtcgctgaggagtcctccagagacggcaccggagcccgccgggccggagctggacgtcgaggccgctgcagacgaggaagccgcgacgctcgcggagccggggccgcagccctgccttcacatctccattgcaggctcgggcttggagatgacgccgggcctcggcgagggtgacccccgcccagagctggtgccctttgacagtgactctgacgatgagtcttcgcccagcccctcggggacgctgcagagccaggccagccggtccaccatctcctccagctttggcaatgaggagaccccgagttccaaggaggccacggcagagaccaccagctcagaggaggagcaggagccaggcttcctgccactgtctggctcctttgggcctggtggtccctgcggcaccagcccaatggatgggagagcccttcgccgctccagccacggctccttcacccggggcagccttgaggacctgctgagtgtcgaccctgaggcctaccagagctccgtgtggctgggcactgaggatggctgtgtccacgtgtaccagtcctccgacagcatccgtgaccgcaggaacagcatgaagctccagcatgcggcctctgtgacctgcatcttgtatctgaataaccaggtgtttgtgtctctggccaatggagagcttgtggtctaccaaagggaagcaggccatttctgggacccccagaacttcaaatcagtgaccttgggcacccaggggagccccatcaccaagatggtatctgtgggtgggcggctgtggtgtggctgccagaaccgagtccttgtcctgagccctgacacgctgcagctggagcacatgttttacgtgggtcaggattcaagccgctgcgtggcttgcatggtggactccagcctgggtgtgtgggtgacattgaaaggtagtgcccacgtgtgtctctaccatccagacacctttgagcagctggcagaagtagacgtcactcctcccgtgcacaggatgctggcaggctcggatgccatcatccggcagcacaaggctgcctgtctgcgaatcacagcgctgctggtgtgtgaggagctgctgtgggtgggcaccagtgctggtgtcgtcctcaccatgcccacttcgcccggtactgtcagctgcccacgggcaccactcagtcccacaggcctcggccagggacacaccggccacgtccgcttcttggctgcagtccagctgccagatggcttcaacctgctctgcccaaccccaccacctcccccagacacaggccccgagaagctgccatcactggagcaccgggactccccttggcaccgaggccccgcccctgccaggcctaaaatgctggttatcagtggaggtgatggctatgaggacttccgactcagcagtgggggcggcagcagcagtgagactgtgggtcgagacgacagcacaaaccacctcctcctgtggagggtgtgaccctgtctgccgtggcccaggactcgcccgcccacctgccttcagcctgcttgcctctccctagcccacacgcagactttgaccaggagtatccagccaggggcacacatgtgcctgcgtgggctctgccttgtcttcgcggaagcattcctgatggaacacccactggccagccaggccatggcttctcccgaccctctggctgccccggtgcttccagtcatgatcgggtgggggacatgtgggctgaccaggacctctgaccctggagcttctaccaaagacacagctgggtctggaccccacggggctggggagggccatgtgcaatatttggagggttttctggagggcagcaggaaggctggggaattccccatgtacagtatttatgtttctttttagatgtgtaccttcccaagcacttatttatgcagtgacctggtcacctggggtgggggtgatttgaggaaatgacatgaggaaaagaaacctattcctgccctggggaccaccctgggactctaaccaagccttcctggagggacccatgcgcccctgagccccattccattcatacagacacacacgtacgcacactgcatgtccaaggccctaaacattgcccgttgacataaactttccagggccccagcctgatggggctgccctcagtcctctagatcaagatgctgactattagggggcagtgattgccatctggggacctgtcaggctttgtcatttcccagtttgttggtggtgcctttagtggttccctaatttgggaacactgatggggccttggacagggctttctctcaggtaggagaaatgggcccatgatctcctcacagtcgcccccagtccttggccctgcttccctgtgtctcatgcactggcacatatggtcaccttggagggcagacctaggagcccctctgaccactgaatccgtctccacaccccttctgccaagggaagccccttcaggaaggaccccccaaagctgaggggctgaatgtagccttttcaacagagaaggctcccacttgagagcagcctctacctgaccccctggaccacagagagccactctgaccctcagccccctcgcttcttcagctaaaactccaaaggtttggtttcagatggggtttgttttgttctgtttggttttggttttgtttggggtgggtgggtcattgcggtcttagattatgtttctcttgctaccaaacagtcatgtattaactctctttggatgatgaagtttaaagagtcaataaatagaaacaccag

SEQ ID NO: 3847 - DNA, 460 bp, Homo sapiens; identical to SEQ ID NO: 1681

SEQ ID NO: 3848 - DNA, 510 bp, Homo sapiens
  misc_feature (1)..(510): n=a,t,g or c
gcggcacgagggtgtcagtcaagaggcaacactaggaggcaaggaatctgcatttctttcagaccttggcagagagcgccctgggaaatgcggatatagaaggtcaggagaacatctctcctggttatacagcattccaggactcctcatctgtttttaagagggaaatctgagttttcaaggaaagccgaatacagttgccaagttgccagtcaaagaaacaatgtcaacacctgctcatagagatggaattcctaacccggaatattgcccttgaattacaacgagaaaaagaacacttcttattcctgtagcacctcttcaagtgagatgggcagaccaccttcaggatgggaaatgtatttcttcatccccctctctaatttccctgtggacctcctgcaantaaggggagaggacaaagaggaggaggcagaaggaacagaagattggagttggccaaagnggaggaggagggagtgattgaacnttgacaagattttgggttgg

SEQ ID NO: 3849 - DNA, 562 bp, Homo sapiens; identical to SEQ ID NO: 3243

SEQ ID NO: 3850 - DNA, 2907 bp, Homo sapiens; identical to SEQ ID NO: 3345

SEQ ID NO: 3851 - DNA, 1071 bp, Homo sapiens; identical to SEQ ID NO: 170

SEQ ID NO: 3852 - DNA, 222 bp, Homo sapiens; identical to SEQ ID NO: 1685

SEQ ID NO: 3853 - DNA, 319 bp, Homo sapiens
gggagggggtattgggtaggaccatccaagaaagggcagaagaccaagggcagtcggggtctagaaaggagggcgctggccctgctgggcgcttcggagcccccactgtttcccactcagctttgtgctcagatcccaggtcccaaggagtgacaggggcttcctcccaccttctgtccttgtccagtcatgtaaataatgtgctatttctctccccgagtctttttttttaaaacctaccgtggttcctcagctaactgcattccctacccaggcagagactgtcctatgcctcgagcttccaaacgagattcagacc

SEQ ID NO: 3854 - DNA, 1899 bp, Homo sapiens
tgaacctctaatagaactgtctaaccctggagccagtggatccttgttttttgtgaccagtgatgatgaatttatcatcaaaacagttcagcacaaagaagctgagtttcttcagaagctactgccaggctattacatgaatttaaaccagaatccaaggactcttttgccaaaattttacggactgtattgtatgcaatcaggaggcattaatatcaggattgtggtgatgaacaacgttttgccacgctccatgagaatgcactttacatatgacttgaaaggctcaacgtataagcgaagagcatcccgtaaagagagagagaaatccaaccccacatttaaggacttagatttcctgcaagacatgcacgaagggttgtattttgatacggaaacatacaacgcgcttatgaaaacacttcagagagactgccgggtgctagaaagcttcaagatcatggattatagccttctgttgggaattcatttcctggaccattccctcaaagagaaagaggaggagaccccacaaaatgtgcctgatgctaagcggactgggatgcagaaggttctctactcaacagccatggaatctatccagggtccagggaaatctggagatgggataatcacagagaacccagacacaatgggaggcattccagctaaaagccataggggagaaaaactacttttatttatgggcattattgacattctgcaatcatataggttaatgaagaagttagaacattcctggaaagctcttgtttatgatggggacactgtttctgttcatagaccaagcttttatgcagacagatttcttaagttcatgaattccagagttttcaagaaaattcaagctttgaaggcttcaccgtctaagaaacggtgcaattcaatcgccgccctaaaggccacttcacaggagattgtgtcctcaattagccaggaatggaaggatgagaagcgggatttgctgactgaaggacaaagttttagcagccttgatgaagaagccctgggatcccgacacaggccagacctggtccctagcactccatcactgtttgaagctgcttccttggcaaccacaatttcatcttcttccttatacgtcaatgagcactatccacacgacaggcctacactctattcaaacagtaagtgaaaatggtgatcacctaagcacatggatgagacgtgagcacagttatggcagagaagtttctccgcaccagaattatccacagcaacttggctgagccccactacacacagagaaatcatcaacctgacttaagagttttcaagatgtcaacttcaggctgatcagcagatgggatgtgaaaaatactaccctattctatcatttgctgttgcttgctgaactgtgaagaactgcatgaactatatttaagctgctttctgtaccattgccaatcacctttttggagttggaagtgctattttcctatggacttttgcattatttcattgtgcatgcatccagtgattatacataagcaacatatgtaatctgcttatatatttttaaaaatccatccacacacatggtaaattaagtataaattcttttgcaaaattatagttcatgtcattgaaagtttaaattggtttcatttaaagatcaatatactaggtctgccttcactttatagaaaactagcttctataaagattttttcactgtttactagtgaaatgagaaaagcaaagctatttataaaaggccttatgtcgtgtacatacattgtctttgaaatatttgtgatctagtttattgcttgtaaaagagaaattatataatttatttagtaaatactactgtaaactatagttttgtgagagaaataaaatattttgttctca

SEQ ID NO: 3855 - DNA, 472 bp, Homo sapiens
  misc_feature (1)..(472): n=a,t,g or c
atctttttttcgacaaatatcctttcaaacagaaagaacccaaagagacacctcaaaatgcctgtaaaattattgcttttctttctctaagtcaggcaggcgaggctacggaaaggaagagatttggtaagtaaattacagttttgtgattgctcccgctaccgtgactgcatgtccgtgagcgccagcaaccgagacaatggtctctcacactctggtagcattcgctcaacctacaacactgaggaagaaagccacactgaagacacaaggaaaacaagtcaatccagtctagagaacaacattcagggaaacagagtaccaacaccttcttagaacatnggaaataaaaaataactccatcagagctacctcgccaaggagcatgttgaaagtccaaaatagcaccattcatcagtgtctcaggtcctgtggcagcatctcggtcacttaccacaaggaaacaatgagt

SEQ ID NO: 3856 - DNA, 697 bp, Homo sapiens
  misc_feature (1)..(697): n=a,t,g or c
tggacacgctcaggctggcgtccagctacatcgcccacttgaggcagatcctggctaacgacaaatacgagaacgggtacattcacccggtcaacctgacgtggccctttatggtggccgggaaacccgagagtgacctgaaagaagtggtgaccgcgagccgcttatgtggaaccaccgcgtcctgaccttggaggtgcgagtctgggaaaggcgcgctcccggggggangcgcncnctgggaaggcgacccctgccctcagtgctctctgtctctgcttccccctcgcaatgctcctctctctgtcccaccccgcgagaacactttacaacgacgaggagattcgtttccaaaccagaggagatcaattgtacttacaaagattcccatctatttaactttattaacttctaccgtgaatgactctgcaagccttgctggtccaagtgcaatatgtaattataaatatataaatagataagagcctatcaatgtatcttttgtacaatatgttgtaaaatgtagatcataggatagctgactttgacagtcacatttataaagtaattcacttaaagatatatatttttccaacaagtttgcacttttgaaataaaccttctttatatgctaaaaaaaaaaaaaagatnggcggantttccttggggggtaattanttgatgcgcgttaangcgg

SEQ ID NO: 3857 - DNA, 468 bp, Homo sapiens
  misc_feature (1)..(468): n=a,t,g or c
tttgaagggcatcactttattccaaagttgatcattagtgagggggatttttacagtcttctttccctcctccctcagctgcctcctggttagagatgctaacaagaattacgatggtcctaagatactggaggaagtaaaaaagttgaaggccctacatattttagttcacgtttggcatttcttggtctttaccctatataaggcaaggagaaaaagacatgaaatttaaattacagataaacacaagtgtattagtccattttcacactgctatcaagaattgcccaagactggataatttataaaggaaagaggtttaatttgactcactgttccacatggctggggaggcctcaggaaactttacaatcatggcagacagttgaaganggaaccaaggcatctttcacaaggtggcnagggaagggagaattgaacnccagggaagggactnatccaaaccnt

SEQ ID NO: 3858 - DNA, 410 bp, Homo sapiens
aaccaaagctgtaaacatctctaattatatttaaaactgtagagtgcagtacattaacatttaacaatcagacactaaattggagtgacgctaatagcattgtgtttattagaaattgggcaccaagtcgtctttcaccagtgacaacagaaggaacagaaaacctccatggccacccttccccaccacgctgcgtgttcaggaagagtcttgtccaaatccccaccccctgagaagatgaggattgctctgtggaaaatacactcagcagaccagacacagctcagcgcccacgtctgttagccttaggcacttgggggaatggttttttttcccagagaaagaaagccacttttaaaaaagcagtaatcaattaattcagaatgaggcaaggcttaaccttctattct

SEQ ID NO: 3859 - DNA, 470 bp, Homo sapiens
tttttttacatgaaaacatgtttattgcctgaataataaaacttagctaaggagttattagaattaggattccccctacttgaagtacaagtttccaataaacagacagacagaagcaaaaccccaaatgagaaagaatacattggtaacctaaatcataggcatttgtgggtatgttcatacaatctacctatttctttgtaatttactatagcactgatgacaaagcatagacatacaatgagaaagagcaaatcagcatatcagtgtgactgtgcaaccactacaaagcttggccttcttaaatgtggccactttaacttacacacacccacagaggcatcagaaatctccctggcaaacacgatttgcctatagttttgtggcaatactggttacatagaacaaaaacaactctcagacccatgggttaataaataagagagaaaagaagtaagaaaccacttccc

SEQ ID NO: 3860 - DNA, 429 bp, Homo sapiens; identical to SEQ ID NO: 3126

SEQ ID NO: 3861 - DNA, 516 bp, Homo sapiens; identical to SEQ ID NO: 1700

SEQ ID NO: 3862 - DNA, 445 bp, Homo sapiens
  misc_feature (1)..(445): n=a,t,g or c
tttttgtgagcatgaattatttcttgttttattgctttcttgtttctttcttgatgcagagtcaatgtttttgagtaacagtaataagatgcccaaaatccaacagtaaacattcaaatagtaagatctgatgcagaacaaagtcctcaaatgttaactcctataagttacatctagcggaaccacgagggataaaggctgaactcatcatcttggtttatgatggaaaccgctatcctctgacccagggaacaggatggaagtctcgaatgccagccacctgtttaggcactggtggcagcactgtgggtctcctcgtgaaatgggccggggagacttcacagtgagtctaagtatggcaaatctctccttttaccccaggattaagagatnccccccgcaactgagagaatcaaaagaaactcctatggaatagaagacgtgg

SEQ ID NO: 3863 - DNA, 408 bp, Homo sapiens
tatttttaactttatttttattgttgacactattacagatagaatgaccacaaccatattaacaaaccaaaaacctgtgcacagaaacaagatgaagaaaatatatcaagatgttaaccacactctttggatggtgaaaacatgggtgagtttctcttctacatttctgtaacttcaaagtttctataatgaacacatttcatatataatggaaatatatgtagtaaaggtggactaccaaaacactagaatgatgacctttcaaggaaaccgaaacaaaataaccataatcccacaacaaccacacaactatttcttgtttttcatctttcttcccatctttgacatttatgcatacttatcactaacaccctaataatcacagactagtgcacagatcaagatgtt

SEQ ID NO: 3864 - DNA, 399 bp, Homo sapiens; identical to SEQ ID NO: 3135

SEQ ID NO: 3865 - DNA, 419 bp, Homo sapiens
ttttttattagtgtaataattttattaataaaacgaacccataggttcataacaagcatacaaagtaattttttttcctgtgggttaaattgttacatttttaataataaaaataagaaagctttcatagttaacttaccaaaaacataacgcttgcctattgtttcttactgtgcaaaacaaaaacaaagttttgcccacagaaggattttgtgcaccaaaacatgcacattttcaatttcaaaatttctgcatcaaaatgaaaattccaaggccacgtttttgttttttcaaactaaagaagagcaagaggggaatcaccaagcaaataacagcagctacatttttaatcttcattcccaggtattttctgtttcaatgtagaattctccacattcataaaatgatatcttcaacct

SEQ ID NO: 3866 - DNA, 479 bp, Homo sapiens; identical to SEQ ID NO: 562
  misc_feature (1)..(479): n=a,t,g or c

SEQ ID NO: 3867 - DNA, 407 bp, Homo sapiens; identical to SEQ ID NO: 1704

SEQ ID NO: 3868 - DNA, 577 bp, Homo sapiens
  misc_feature (1)..(577): n=a,t,g or c
ttttcagcttttcagaagttttattataaagagatttgagagaagcactgggcaccaagacagacactcgccagggccaggaaacagctgcaaacgacgtcaagaacccaaacccaaacgaaaccccaaaaccacacacacggtaggataagctgtaacttcattctcaaggtttcttcataaatagacaaaagtcgtcgccggcaatttaaaatagatgaatacatgattaaaaggagagcagtgctccgggggtggctagcaagcgtccggtccttgctgtgaggatgacgaaacggtttggcaagccgcttttgtgcgcgtctcccttaagataaaacttaaaaatgtgctaaggatcatataaaatgctttttaccctaaaggaaactacttttttnccccacaaaatagtcttacagatggtctttcagcacaggttctaaaacacgtaggtcaactacttacacggaacccacaggtttctagggttcgtaatcttttggtcacactggaaaaccgatggtgcacatctatgccggggggcgggccctctggccaatggcatcttgggggg

SEQ ID NO: 3869 - DNA, 342 bp, Homo sapiens; identical to SEQ ID NO: 1707

SEQ ID NO: 3870 - DNA, 379 bp, Homo sapiens; identical to SEQ ID NO: 3373

SEQ ID NO: 3871 - DNA, 325 bp, Homo sapiens
acgtatagcaaagtatattgtaaacaaatttaatgaccaaatgatagactggtaaaaaatgtgcctatcaccaagggctgatacctttcctgtggcccaggcctctgctctttaaaaatggggcacaaatacaggcaggtaagagacagacagctctcatcctgcactcttggctttctgagaggtatgaccccaaggtcctggagtctagctgctgcttcctcctctgggaaatagaggagtgatattggtagtacctagggcatagcactgctgggacaattcagtgatttggggactgatctccatatcaagatgacctgat

SEQ ID NO: 3872 - DNA, 351 bp, Homo sapiens
atcaacaatcctttaattttttatttttatttttttccctgggatttcgaaccaatatactcctagcctgaacaacatagaacatttcctttccattttggtagaaattattttttaatgtaaattatattgtgttctatttgtttccaatgtcttgaaaagttcaatcacttctccaaattctccgaataaacataagaaaatatctctccccagcactacccggtcccccagtatcaccatcctaggaggcacttccacttcctctatcatcagggaaggagtgtgcagttctgatttagctcctcagtggagtaaagggaatttagaggaagggggatttctgcagaa

SEQ ID NO: 3873 - DNA, 359 bp, Homo sapiens; identical to SEQ ID NO: 1709

SEQ ID NO: 3874 - DNA, 271 bp, Homo sapiens
ttgtgcttttaaaagtccttttaatacagcatgaagaggctatatttctataggcgagccgtatacagattctccaggaataaggcacacaacggaatgccatcccaagggctgcacttcggagacgtcggagccttctccacgcaccttccgagctgggcccacgggttctgttttgtctttttagctggactcacacgtatggacagacacagacacggacggggtcaccgcatgggggcggaggaggtcggacggcaaggttggcaac

SEQ ID NO: 3875 - DNA, 460 bp, Homo sapiens; identical to SEQ ID NO: 3168

SEQ ID NO: 3876 - DNA, 379 bp, Homo sapiens; identical to SEQ ID NO: 3388

SEQ ID NO: 3877 - DNA, 412 bp, Homo sapiens; identical to SEQ ID NO: 387

SEQ ID NO: 3878 - DNA, 421 bp, Homo sapiens
tttttttttttttttcattttgaaaatgctttaataagtgttgacaacactgttttgcaaaatgtaaagatactatacaaattcttaatacaaaaagaataaattaaaagcagatttctttttttaattctgcaactttgtctacaacgtacatctttttcattgattacagttgaacagaatccagtaaaatcattttacatgctctacagtcagtttcaggagcaacctaatcttttttcccccattattaaactagagtccattttacacaacttgtaataaactattgacattaatgtatatgtaaaactttacacctagttaactaagcagtaactggtcatctgatagcacctggatggggtttgctatatttagaactaaactaatactgaatgaaaacaaattggaattttaa

SEQ ID NO: 3879 - DNA, 490 bp, Homo sapiens
tttttttttttttttttttttttttttccttttagtaagaaaaactttatcaaaaatttaaatatataaaataaggccagagcgtgcactggaggccacttcccagtggtgcactgctgcgctgggtgtccctatgcagctagatacatgttaactgcatagagtaccataaaggagcccactggtgagcttcactgtcacctggccctgctggctggggcttccattgtctactgggtctgtccacaccccagattgccttgtggtcctttcccctggccaagaagataacagttttttaaaaatccccttctgatatggatgtgagcaagcagtggggttcagtttgggaccaagtagtgccatttacaaagagcatgggaagcacctccttaggaggggagcagggccatctccacgttgtcaggggccgcgccgttgcctgccagaccctgggcccacttgtgcaggcggctgtagagtgggaggc

SEQ ID NO: 3880 - DNA, 394 bp, Homo sapiens
ttttattgctgaaatagagtctttatttctgaacattccaaaacagcagtgtacacagtaacaaatattaagttatatgccataagaaagcattcattagtgcaaatggattttgtaaaaggtctatcaaaaagatttatttgctttaaaatgcattcatttccagaagcattgttaataaaacattacagtttcatccttcgtaataaagtattgaaaatcaattgtggtacagtagcaaacattgcaggtattaagtgcaatgagctcatgatgccgttataaatatgaaacccatgtatgacaataaattaaaaatgaaaaagacaggaccatttaattctgctgtctggttatctccttgcaatgcttcaaattatgttgtgctcattca

SEQ ID NO: 3881 - DNA, 394 bp, Homo sapiens
tgtagaaattaaaacactttaatataaacatttccagaatatagactgaccttatatcagtactttttgagaccgttttaaaactatatatcatctaagtttattatagactgtttcattttccactttcagaactagaaaatgcaaaaatacactgcaaattagatttaacaaagaaaaaatcagtttaagttatttcatacatattccttggagaaagctgagacacataaacacagaaaaacaacaataaaataccaccaacactaacacaaaaccaaggaaagaactgattttgtaacgcttggtaattctgtcctttaaaataaattatctcccatgaataaataattcactatcacagcaatttgatgagcagaagtagagacaactt

SEQ ID NO: 3882 - DNA, 323 bp, Homo sapiens; identical to SEQ ID NO: 3189

SEQ ID NO: 3883 - DNA, 418 bp, Homo sapiens; identical to SEQ ID NO: 2842

SEQ ID NO: 3884 - DNA, 317 bp, Homo sapiens
ttttttttttttttttttttttttttttatcgtttggagaagtttattaccacccctaccctccagtgggatctcaatgtcacgatgagtccggggctggctttccgccgggaccctcctgtcctggcacatggcccaccccagcacgaagcctggccgggagggctcaggtgggtggctgctaggccaggcctccccagaacgactgccccatgtccagcctgtatctcctgagtgccatgctgcactggggagggacagggctggctcggggctccaggaaagatgcctcacatgtgcctagaaatgtaggcgtc

SEQ ID NO: 3885 - DNA, 378 bp, Homo sapiens; identical to SEQ ID NO: 1720

SEQ ID NO: 3886 - DNA, 199 bp, Homo sapiens
caaaacaagacaatgttttaattgtaaaactaactcgaggcatgggtgggcgggctggggctgcgctgaccgggcaggaacctggttcttcaggcagtggttctgccagggccaccccgcaggacagggaccatctgtcccccaataagggcaggggctagagtgttataaaatgacaatataaatagacttctagaaa

SEQ ID NO: 3887 - DNA, 461 bp, Homo sapiens
tttttagtttttttttcaggtgaatatggttttattcagcaacagctctcatcaacagcttacactagctctctcacactgtccacctgccttggctgcttgagcccgtggttcccacacacagctgtgcagcctgctctcccttgccttcagggtcagcagcttaactttttctctctctgggcgtgacaacctgagctgtgtcctggctccttcctgtccatctgcaaaacggacagctttggctctctctctctcttactgggcgccagtgtgcccaccatgtcaagccatgttgagctgagccgaaccccaagagcccctgtacagcattagcaggacaattaccttttacagacaacagtggctcagaccaagtatgaacttacacaaacaggttatataacaagtggaggtgtgtgcctgtgcaccaaacccactgagtcatgcaggcatggatc

SEQ ID NO: 3888 - DNA, 311 bp, Homo sapiens; identical to SEQ ID NO: 641
  misc_feature (1)..(311): n=a,t,g or c

SEQ ID NO: 3889 - DNA, 247 bp, Homo sapiens
cacaaaggatttgctgtaagtcttcaagtcattttgtccaatccaaaagctgtatttaagcgtcgtggatcccagccagggatgcaagaatctgactttctcaaacagataacaacagtcgaagaactggaaccgaaagcaaataactgcactaaggtattcattacacttgtgctgcccgacctcgagtgtcaccatgaagagtgcgctacccaagctatttccttccccttcaggttctcgtgtg

SEQ ID NO: 3890 - DNA, 249 bp, Homo sapiens
aggatttctattcatttttattcattcctccaaagagcaccacaggccaaccacacccttgatgtgtccttcatggttccccactgcagtggacacaaatccctccctcattatccaggcatggatggaactctgctgtggtgaggaggttgtctcgcccactcacccaagttttccatgcctgttctgcttttgatggcaatgccaaaattcatcatacatttccttgaattcctgccttcaagggtc

SEQ ID NO: 3891 - DNA, 337 bp, Homo sapiens
cttcaaggggtccattcctttaagacaattttggatttctttaaaaaatctattttatttgctatattagatggctaacccaaaattgtttcttgggttattgagtaataagtatggtttaaatggcctaaatactacatattttaaaagccttgatgctggcagagctgcactgaggatctgtgtttttaagaagtgcctgggtcgggtaaggtgaaattctaaactggaggacacattagtcagtttatctctctaaacttgttcatccaaaataggctttttaataaacaatttagcttatacttcaaattaataatccccccacacacattct

SEQ ID NO: 3892 - DNA, 305 bp, Homo sapiens; identical to SEQ ID NO: 2145
  misc_feature (1)..(305): n=a,t,g or c

SEQ ID NO: 3893 - DNA, 475 bp, Homo sapiens; identical to SEQ ID NO: 2153
  misc_feature (1)..(475): n=a,t,g or c

SEQ ID NO: 3894 - DNA, 279 bp, Homo sapiens
tttttaaaaaattgtttaccctgtacatgtttctattgaatcctaagtacgaatgcccaaggagataaagcaagtgcagttaagtatgcatgggaaagctaaaatgggtatgtacataagatcggcaaaggaaaccaagttctgtaaaatgagttctccctcccctccagggtagctgattatgaggaaaataagaaagagctttgcttttctccttagtagtaatggtctacaataagctgcacacacacatccctcatcacacctctctgctcaaaa

SEQ ID NO: 3895 - DNA, 440 bp, Homo sapiens; identical to SEQ ID NO: 3269

SEQ ID NO: 3896 - DNA, 252 bp, Homo sapiens; identical to SEQ ID NO: 2899
  misc_feature (1)..(252): n=a,t,g or c

SEQ ID NO: 3897 - DNA, 298 bp, Homo sapiens; identical to SEQ ID NO: 1786
  misc_feature (1)..(298): n=a,t,g or c

SEQ ID NO: 3898 - DNA, 477 bp, Homo sapiens
  misc_feature (1)..(477): n=a,t,g or c
tatattttctgactgaatctcaaaattagttggggcattgggaaagaatttaatttgacttttgagtgtaaaccaaggatgtatttctttgaaaagataaaacaagagggctaatcatcctaaacatgaatgtctgcacagattgaaattcccaagatgcccaggagcccagcctttgcacagcctccagcaccgacattatgtgtgttttcaaccacttcccccttatacaaagggatatgtttgcagagtttctcaatgggtgacccaagcagggaaccaatccacgtctttgatcagagactccagaggggttgtacttgacccagggtgtatttgttgggagaacatgttgtccagagcctgtttctcataggatgtaccattgggagattgttcagaggangggatgttctgatgggnccatcttcagggtaaagcaggctcttcgggagagcacccggggntgcaatntag

SEQ ID NO: 3899 - DNA, 397 bp, Homo sapiens; identical to SEQ ID NO: 2226
  misc_feature (1)..(397): n=a,t,g or c

SEQ ID NO: 3900 - DNA, 399 bp, Homo sapiens
aagaacgtcagctcctttattattattattattattattattaattatttactgttatttacccctaaacaacagcataactcaaataataatgacacacacgtcccgcccatatacacaataccactagcctatctgtcaggctatctggcctttgcttggttcctgatggagctgtctggagacagtccctcctgtaaaaatcccgacttaaacacaggggacagaagaaaggggggacctaggtcagatcataaactgacaggctcccagcgtccttagggagtgctaatgtggaaacttttgagaacgtgctggacacatctgggcagagggcagaaggcactggtttgtttttatgtggttgatggataaattccatatgggggatataaggac

SEQ ID NO: 3901 - DNA, 408 bp, Homo sapiens
  misc_feature (1)..(408): n=a,t,g or c
gaagcggagnattactttattcaggcagggactagccaggcagggcacagcgtcagcggatggggggagtcagcacatgggagtgccgtcacctccattagccacagncagacggccaggaggngtgctactgcagtgagatggtgcactactgcagtgaggtggcgcagggctggtgagcttgggcacaaaagccagcatgtcaccctccctttggagaagcctctgggccacaggctttttccagctgacgggatgcggagggaaggggacctagtactatcgggattcagctgacttagcctatngagatggagcaggcaagagattccctttgcagggtgggaggttatattcctacagcctccattcttggagtaaggctcctttgccacaccccttttcacc

SEQ ID NO: 3902 - DNA, 454 bp, Homo sapiens; identical to SEQ ID NO: 3308
  misc_feature (1)..(454): n=a,t,g or c

SEQ ID NO: 3903 - DNA, 247 bp, Homo sapiens; identical to SEQ ID NO: 3315
  misc_feature (1)..(247): n=a,t,g or c

SEQ ID NO: 3904 - DNA, 365 bp, Homo sapiens; identical to SEQ ID NO: 3316
  misc_feature (1)..(365): n=a,t,g or c

SEQ ID NO: 3905 - DNA, 322 bp, Homo sapiens
cagatacaaagcagtatttatacatttatttatatatgtatatttacttcagaagaaacgaacatttcggggacaggaagcaagcaggcccggggctgcttccctcactgcccacctcagagtcagagttggcacatgacaaataccaagctcagggagaagaactgggagttaactgggaagtagggggcgctctatgcacacgcaggcttctaagggtgcacggtatgggcaggaggatttgcactgggaggccctatgtacagcttgaagctagggggagattagcccagtgactacaggaacaaacgccaaaggagag

SEQ ID NO: 3906 - DNA, 321 bp, Homo sapiens
  misc_feature (1)..(321): n=a,t,g or c
caggttccaccagaggcttttatttcagccactcaggaccctggctttctgctccaaggcactgaacacagtcaggctcttctaaacactggcagggacctcccccacagccacccccacagggttctctgtttcccaagtcctgatggattcaggcaagaccttcacacattcacccactacctgctggagaggagggtcatgaggcagcctgtggtgcccagctcagtgtgacacactgccaatgtgccgcctcccccagcctctgatggggccgggncttgaccacgtgacaggctcaagctgccgtgcacatccccc

SEQ ID NO: 3907 - DNA, 259 bp, Homo sapiens
  misc_feature (1)..(259): n=a,t,g or c
cacctggcagttgagtcagattgtaggaaaattaacccagatgggtctacatttttnttcaagttcaaaccacatggtttcctagtcagaaagtctcatggactttcttcctaagctgttctatgatcagaccacctcctaaatgtggcttttacccattacaggctacagttgaatcaggcaggagcagctgctggagagcacccagccgacagacctgcattccagaagcagcttggagaaactgggaagacatttt

SEQ ID NO: 3908 - DNA, 471 bp, Homo sapiens
tagcaatataaagaaagatttattttcaaaagtagcaaaacttgtttgaaaaaaatatatatctttaagtgaattactttataaatgtgactgtcaaagtcagctatcctatgatctacattttacaacatattgtacaaaagatacattgataggctcttatctatttatatatttataattacatattgcacttggaccagcaaggcttgcagagtcattcacggtagaagttaataaagttaaatagatgggaatctttgtaagtacaattgatctcctctggtttggaaacgaatctcctcgtcgttgtaaagtgttctcgcggggtgggacagagagaggagcattgcgagggggaagcagagacagagagcactgagggcaggggtcgccttcccggggcccgctccccccgggaggcggcctttcccagactcgcacctccaaggtcaggacgcggtggttcca

SEQ ID NO: 3909 - DNA, 252 bp, Homo sapiens
ttgccaatgatgttgagctttattaatggcccctctccagaggctgctcagttgtccccagggaactcctcagagatcctctgccttcccacatatgagcccgaggacacctcgggagcagagaagtgaaagggtttccgggtcagacgctgcactccacgcctgcgtcctcctcgtggctgcagtcatgatggccccagctattcttggtgcagctccacagggtactctccgtgccccgacactgaacaa

SEQ ID NO: 3910 - DNA, 323 bp, Homo sapiens; identical to SEQ ID NO: 1820
  misc_feature (1)..(323): n=a,t,g or c

SEQ ID NO: 3911 - DNA, 420 bp, Homo sapiens; identical to SEQ ID NO: 3136
  misc_feature (1)..(420): n=a,t,g or c

SEQ ID NO: 3912 - DNA, 403 bp, Homo sapiens; identical to SEQ ID NO: 3139
  misc_feature (1)..(403): n=a,t,g or c

SEQ ID NO: 3913 - DNA, 354 bp, Homo sapiens; identical to SEQ ID NO: 2274

SEQ ID NO: 3914 - DNA, 393 bp, Homo sapiens
ttttttttttttttttttttagttctacccatgtttattgctaccagctggtctccctccaccctctcatatttacacccaaccccttccccaaagctagcttttaccaaagttcctggtaggaggtcaagaagtgtgtccacttagccggcagtcctagatgtagtggacgctgtttgtccccaggccagttgggcaccaggaagggctactctggggattcagggcatagacttcgtactggggtcaagggaggcccccactcacagatactctcctttccttctggggctcaatgtacaccaaaaccttcagaaagcaaagttggagtggtggacccccaatgtcaagtttagtgctctctttgcttgtgatgacccacacaagtggcca

SEQ ID NO: 3915 - DNA, 338 bp, Homo sapiens
cagaggtcttgtcttggtttattcaggctgtattgagattgggaggatgggcaaaaacctgggggtggggctggcaaggaggcagttggcctaacaggacagagctgagggggccaggtgggttcagggagggcaggagactcggggcttcatatccggtttctgcacacgggcagtgagcgggaacttggtgatgccacaggtattgctccctcggtgcagccggaaatagcccttctctccccattgggccccccaggagttcttcaggatccagtatggggtggggtgtggaggctgaggctgagactgcgatgagactgtctctgcccatatcc

SEQ ID NO: 3916 - DNA, 419 bp, Homo sapiens; identical to SEQ ID NO: 3166

SEQ ID NO: 3917 - DNA, 427 bp, Homo sapiens
ttgacattacaaagtattttaattcttttaacttagtccagacacaagaagccagattatattttaggtgtcgacagaactatttttttaaaatagcaagttcaggtgagttagtagtcatgaaaattaaaatgaaataccaattccatttcctcgtgtacctctttgcaaatgtcggacaaagcagagttttataatagtttaataacttgtgtaacaacggtggctttggtgtatctctaaagtggagtctttaaattataaaggattttgtgtgcttgaaatcattttcactcattgtcgtggctttagatgaagaattactcttctggaaggaggtttcttttgaaaagtagcctttcctctgagcatagcatacaccaaggccacaaacggaaatcactaaggccacaactactacggctgc

SEQ ID NO: 3918 - DNA, 380 bp, Homo sapiens; identical to SEQ ID NO: 2932

SEQ ID NO: 3919 - DNA, 383 bp, Homo sapiens
agagtaaaaaaggagtttatatatttataaatgccaaataaataccagaggccacccaacgccccctcccagacagggctgtctcccccagccctaggcttctagggtgtgagacatcttggccccaagctatagcccaagagcagctgtcagtctgtgctaccagggaactgagtgaggatgatctgtccagccaagtttcactccccctgtgtgaggggcccccatagccacaggcctgggtccctgtataggaccctaagggtgaaagactcagggggagaaggtggccatctcgagtgagacccgctgccacagctccttggtctgtttgctgcgcttgaggttctgtaggatgtcgttgaactgcatcatgcccatgg

SEQ ID NO: 3920 - DNA, 412 bp, Homo sapiens; identical to SEQ ID NO: 1857

SEQ ID NO: 3921 - DNA, 451 bp, Homo sapiens; identical to SEQ ID NO: 3449

SEQ ID NO: 3922 - DNA, 376 bp, Homo sapiens
gagttatggtagtcatgagagcatctgatagctcctctgtgactcatccatttattttaatgacatctgaatatgacagtatattgaaaaaagaatgcatgttatttattccatactggggaagtgccactataacattgttttaaaaaatcttcaaaaatttcctattagaacctatcattgaattagaaaagcaagctttgccaaatgcctgattatgcctttactggtcctgctagctggcatgtttcaccaacttttccctagtgtttcctttggcactgttgagcccacactacaaaacatgaacaagtcccacaaaaccacactatgccctctgcttccccatcatgtggggaccatctgcctggacatc

SEQ ID NO: 3923 - DNA, 381 bp, Homo sapiens; identical to SEQ ID NO: 3183

SEQ ID NO: 3924 - DNA, 457 bp, Homo sapiens
tttttcaccagaactgactttattaaaaaaatgacaaaacaggtctatacatatttacaggctgggagccaggaggctcaggtccgacagcaggggccaggctgctcacttcttggagagcttgacttgcttgtgcttggggggtgcccacttgaggcagacggagccactgtgatgggtggtttcttatactgggcacttttgaggtgctcctccaccagcttgggtgtgacacagatcacgtgctggcccttccagtacttgaccatattgagggattgcagggtactgatgatgtcattttgggtgatactggtcatctggctgaggtccttgatggacagtgtgccccggaagtcccgcagatctccagcagcacccaggaccagtagctgcggtaactgagcttgcccaagtcagacagcggcttctccggggagccgactgtgctctccag

SEQ ID NO: 3925 - DNA, 514 bp, Homo sapiens; identical to SEQ ID NO: 1862

SEQ ID NO: 3926 - DNA, 310 bp, Homo sapiens
  misc_feature (1)..(310): n=a,t,g or c
attttgtctttttttttttttttagtctaaagaaagttctgaacagaatatcaattaagcttacatcacaaaaactttaaatgtatttacagagtgaataagttacatagataaacyctgaatatgtttctgcagtgcaacaagttcacatgcacacatctaacacttgacagcattaagttaaggagagacttaagatggccctttacatatatmtyvcamataanmtatgacatcgaagaaacaagtaacaactcatattttacyttatgattctacttctgactatccaaacagatattaaaatatg

SEQ ID NO: 3927 - DNA, 449 bp, Homo sapiens
  misc_feature (1)..(449): n=a,t,g or c
ttttttttttaatctggtaattttatttaatatttaccattcagcagcaaccaacatgaacatgtgggctaacagaatcncttaaaatgttctgctatgtagctgcttcagaaatacacacacatgataaattcaagataaattcaactggctcactgccaaaattttttttaaaaaatggctccaagagcaaataacactgatttataatgtgcccaagcactacgtcaacaaatctattaaattacacaggaaaaggaaatcaaggaagctttgttatcttatgcatgtcatcttatttaaatggaaggttttacttctttaaagcaacagaaatatggagcttcacatatatatgtatatatatatgaatgtggttacaaacacgaaggtttattcaaaagcaaaagctagttcaaaaaatttctgactgcaaaacttggcaagat

SEQ ID NO: 3928 - DNA, 510 bp, Homo sapiens
  misc_feature (1)..(510): n=a,t,g or c
cccgacaaagatgcctttattgggcgacagacgcggggtggggcgctangggnggtgcacggcgggccggtacgcagngatnctcggcgctgtgngancacgtgtatttgaactctttctcctgcatcgcgctgtccaggtagcggcgtacgcgangctccgcggggatgggcgcctggcggaagtgcgcgcacaccgtgtcgacgatgtgcagcttgggcaggaggctgcagtcggccagcgtganctgtcgccgtccaggaagcggcggcgngactcgcgcantgcggctcccccgccagctcgtgctccaggggcgcgcgcaggtagctgtccagcctggcgagggcgcgcaagctgctggtacagggcttcgtcctgcgcgggcacgggttcttgatgaacgcggagaattgtggaaaacgtcgttgccggcggtgttggactcctgtaagagcgccagctggggaatcggcggcccaangtctctcaggaatcngatttnaacgt

SEQ ID NO: 3929 - DNA, 282 bp, Homo sapiens; identical to SEQ ID NO: 220
  misc_feature (1)..(282): n=a,t,g or c

SEQ ID NO: 3930 - DNA, 301 bp, Homo sapiens; identical to SEQ ID NO: 2648
  misc_feature (1)..(301): n=a,t,g or c

SEQ ID NO: 3931 - DNA, 341 bp, Homo sapiens; identical to SEQ ID NO: 2329

SEQ ID NO: 3932 - DNA, 418 bp, Homo sapiens; identical to SEQ ID NO: 1914
  misc_feature (1)..(418): n=a,t,g or c

SEQ ID NO: 3933 - DNA, 610 bp, Homo sapiens
  misc_feature (1)..(610): n=a,t,g or c
ttttttaagatgtgtcaggtgtttaatcatcattgtggggggctctggttgtagaagaaagcttggcaaggtggggttatacaggagagagattatacaggagagagttggtctgaggccagaacagttcaagggaaaaagaaaagggagctgatggatgggatctgtctgtgggcccctcaaggcctccagtactactctcgcctgcctcaggttcctccgactgattcagttctgcacgctcctcctcttcctcctggttttctggggccttcctctcctctcctcggcgttgcncctttgccacaagatgaccccaatgagcagggcggctgtccccaggcctcccaggatccccagggccagggctagagttcccagccctgatcctcccacagagcctgcagttggcccctcctcgcctggttcgatgatgctgatgctgacagcacggctttcctggggcccgtgntggaatgggtggccacacagctgtaggttccctggtcctgaggcctattcagggaggattagacagggtggggggnagggaagggacctcgtgcgaattttggctcgaggcaaattcctatagtggtcgataattgga

SEQ ID NO: 3934 - DNA, 189 bp, Homo sapiens; identical to SEQ ID NO: 3306

SEQ ID NO: 3935 - DNA, 406 bp, Homo sapiens; identical to SEQ ID NO: 3132

SEQ ID NO: 3936 - DNA, 429 bp, Homo sapiens; identical to SEQ ID NO: 3133

SEQ ID NO: 3937 - DNA, 554 bp, Homo sapiens
  misc_feature (1)..(554): n=a,t,g or c
tttatgagcaaatccaaatttattttaatgtcatgtcattttcaatgtgtttaaaaacctcataagttagtgggagccctagtttcctgggacagcatgccagaggtactgaaatttgtcacctttctctacaaacccccagcaatccaatccaagtccatagcttcagaaagccaggagttgtgtcttcagtcagtctacgcctctggttcntgggttttccttncatggggaggggagatnncaanatttcaaacaggggaacaaaaccaggttgaggcttccangctcagggtctgtgtaagatggagcgaggaaagaccccactngactccagagaaaaaagggtaaggtttgagatggattatttcntttacagctttggtgaaaatgggaagaaaaaagatttacaaatgaggatnccatttcataggatggagaatctcttcataaatgaaggctccaggtcccaaaatggggagggggcctgactggacagcctgaatcngatgaggaatcggccacactggattanaacaatctgaaaaataatc

SEQ ID NO: 3938 - DNA, 463 bp, Homo sapiens; identical to SEQ ID NO: 1935
  misc_feature (1)..(463): n=a,t,g or c

SEQ ID NO: 3939 - DNA, 216 bp, Homo sapiens; identical to SEQ ID NO: 3161

SEQ ID NO: 3940 - DNA, 239 bp, Homo sapiens; identical to SEQ ID NO: 1942
  misc_feature (1)..(239): n=a,t,g or c

SEQ ID NO: 3941 - DNA, 216 bp, Homo sapiens; identical to SEQ ID NO: 3164
  misc_feature (1)..(216): n=a,t,g or c

SEQ ID NO: 3942 - DNA, 361 bp, Homo sapiens; identical to SEQ ID NO: 1951

SEQ ID NO: 3943 - DNA, 354 bp, Homo sapiens
ttttgtgttttttttttttgtggtcttgacaatttattggaataaaaaacatgtatcacttattgacagagctttgtgttcaaggcacattcatacccatttcctcagcagaacctcacatccctacgaattagacaagtcagtcattattctgcagatgaggaaactgaggctccaagaggataagtgacttctccaaggtcataccactggaaacagcaaagtcagagctagaatttcggggctcctgagatatccagaattctttcactgtgcaatgctgcctctccaataaataaatgaacaaaataaataaataaagctttcaagggaaccctgaggaatcctccctca

SEQ ID NO: 3944 - DNA, 423 bp, Homo sapiens; identical to SEQ ID NO: 54

SEQ ID NO: 3945 - DNA, 391 bp, Homo sapiens
tacactagcatccaaagtttatgaaaaacttccacacactcagtcctcacaacaaccgtgagggaggtaaggcagtgattatgatcccatttcacaggttgaagacaccgaggctcagagaggggaaatgactggcccaaggggacaagacgcatcttaagatgtcaagtcctggacccttccctgcaaggccccctgtggaaggaaatagctctgctggacattcagccactgaagagagcccccagtccagaggcttggagaccactggaggctctggcctggtgaccctgggtctcaagagaaatccgtgcggagagggaggggcttttccattccactgatgaggagctcaggctcttgggacatcgtggaggtactgggcaccgct

SEQ ID NO: 3946 - DNA, 412 bp, Homo sapiens; identical to SEQ ID NO: 3483

SEQ ID NO: 3947 - DNA, 495 bp, Homo sapiens; identical to SEQ ID NO: 3193

SEQ ID NO: 3948 - DNA, 543 bp, Homo sapiens
tttattttttttttttaccaaaaacgcaggggatttatttgaggtttgggtgaaaaataatcctgtgggtggtggtaggccgacagatggggacaggaagctgtggacgaaagccccaggtcccgtgggagaggtgacagcagcaggggcacgcagccacgtgggtccccaggggaatgtgaaggcggagggctccaggcgaactggggattaaacaaatatttacaggcagcagggaagtgcccagcgcacgtgacgggggcggggcgggactttggggagggcggggctaacggtatcgagcgagccggttgtagacgtggtccaggtttctgcacaggaatatcgagagcgtcatgaacccgagctcgagtaggccgacgcccaggcaaatgcccactatggaaataaggttgttgtgcagccacttctggaggcctgcgcccaccctcgcggtagatgtggctctctgcaggacagcgcaatgtctgcactgtgtctgggacgcgccagtgtccagcctgctgagctgggcaagatcac

SEQ ID NO: 3949 - DNA, 369 bp, Homo sapiens; identical to SEQ ID NO: 73

SEQ ID NO: 3950 - DNA, 329 bp, Homo sapiens
  misc_feature (1)..(329): n=a,t,g or c
ccaggtgaacaagtaaatcattggctttattctgggtcctggaagctccactgtnagtntgaaaaaaagacacaacaggggcggcagccnggngggctggtgcagaaaatagtccctggntcctntggccctgggagcctaaagggcagtgaggagaaggnttagcaagaggcctggagcaggggaagtcaggtccctcaggaacccctcctcccccagaggaaggaggaagagggctggagagtctgctggagagtctgctcagttcctcagcaactgcactncaggagggtgcaggccatgggttactccttgcccttntcaggggc

SEQ ID NO: 3951 - DNA, 443 bp, Homo sapiens
  misc_feature (1)..(443): n=a,t,g or c
ggaatttattgaaatacagtgtatcatacaaatagaatattcacatgaaatgatcaaaggaaggggtaaggagaaaagtattaaaactgaaaatttacctagtgaataagtggacataacaattgagaatctatccacttcatgtcacttatggaaacaacacattaagattaaactacatgtttgctagagtaggagaaagtatataccacagggaccatcattactctagagtgggtctatgcataactcctcaaaaagagggccatcgttggtgtttatgtggctaaaagttgtgtattttgggcttctggagaaccataaaattggactcaaagaatagtttcaaaggaggtaaaagaaggaaatgncgtggacaattggaaggacatgggaattnaaatgggnttggtcncccaantggccccttaggtaacccagag

SEQ ID NO: 3952 - DNA, 363 bp, Homo sapiens; identical to SEQ ID NO: 129

SEQ ID NO: 3953 - DNA, 432 bp, Homo sapiens; identical to SEQ ID NO: 2396

SEQ ID NO: 3954 - DNA, 163 bp, Homo sapiens; identical to SEQ ID NO: 3260
  misc_feature (1)..(163): n=a,t,g or c

SEQ ID NO: 3955 - DNA, 231 bp, Homo sapiens; identical to SEQ ID NO: 200

SEQ ID NO: 3956 - DNA, 457 bp, Homo sapiens; identical to SEQ ID NO: 3268
  misc_feature (1)..(457): n=a,t,g or c

SEQ ID NO: 3957 - DNA, 258 bp, Homo sapiens; identical to SEQ ID NO: 3501
  misc_feature (1)..(258): n=a,t,g or c

SEQ ID NO: 3958 - DNA, 324 bp, Homo sapiens; identical to SEQ ID NO: 1998
  misc_feature (1)..(324): n=a,t,g or c

SEQ ID NO: 3959 - DNA, 145 bp, Homo sapiens; identical to SEQ ID NO: 3505
  misc_feature (1)..(145): n=a,t,g or c

SEQ ID NO: 3960 - DNA, 417 bp, Homo sapiens
  misc_feature (1)..(417): n=a,t,g or c
ctactaaaatatattttaatagctggtgttaacaatttgcataacaaaagccaaattatattagtaacattgtaacattccgtgacgccccttcatttgcaaaacattcaatgttttcttcaaaactgttacactctcaacgttagtctcgcaaattaatcatcaaccacaattctacatattttgacgcaaacagacgccaaactgtacaatggttcanttttgatcacaggtcaaacatcangtttcacaccatgcctgtaatagacttggtgctgcttcctaaatgctcagcaattcattacatgggcactggcgactgggactgtgatgcagttttctcttttcctttaaagtccatcattcttaacagcaactggcttncnccgccgcgcnactctgccanactgggatccc

SEQ ID NO: 3961 - DNA, 231 bp, Homo sapiens; identical to SEQ ID NO: 3283

SEQ ID NO: 3962 - DNA, 493 bp, Homo sapiens; identical to SEQ ID NO: 221
  misc_feature (1)..(493): n=a,t,g or c

SEQ ID NO: 3963 - DNA, 305 bp, Homo sapiens; identical to SEQ ID NO: 222
  misc_feature (1)..(305): n=a,t,g or c

SEQ ID NO: 3964 - DNA, 429 bp, Homo sapiens; identical to SEQ ID NO: 2013
  misc_feature (1)..(429): n=a,t,g or c

SEQ ID NO: 3965 - DNA, 467 bp, Homo sapiens; identical to SEQ ID NO: 2014
  misc_feature (1)..(467): n=a,t,g or c

SEQ ID NO: 3966 - DNA, 1364 bp, Homo sapiens; identical to SEQ ID NO: 2016

SEQ ID NO: 3967 - DNA, 419 bp, Homo sapiens; identical to SEQ ID NO: 3212

SEQ ID NO: 3968 - DNA, 1021 bp, Homo sapiens; identical to SEQ ID NO: 3213

SEQ ID NO: 3969 - DNA, 2497 bp, Homo sapiens
gggcgccgaggctccccgccgctcgctgctccccggcccgcgccatgccctcctacacggtcaccgtggccactggcagccagtggttcgccggcactgacgactacatctacctcagcctcgtgggctcggcgggctgcagcgagaagcacctgctggacaagcccttctacaacgacttcgagcgtggcgcggtggattcatacgacgtgactgtggacgaggaactgggcgagatccagctggtcagaatcgagaagcgcaagtactggctgaatgacgactggtacctgaagtacatcacgctgaagacgccccacggggactacatcgagttcccctgctaccgctggatcaccggcgatgtcgaggttgtcctgagggatggacgcgcaaagttggcccgagatgaccaaattcacattctcaagcaacaccgacgtaaagaactggaaacacggcaaaaacaatatcgatggatggagtggaaccctggcttccccttgagcatcgatgccaaatgccacaaggatttaccccgtgatatccagtttgatagtgaaaaaggagtggactttgttctgaattactccaaagcgatggagaacctgttcatcaaccgcttcatgcacatgttccagtcttcttggaatgacttcgccgactttgagaaaatctttgtcaagatcagcaacactatttctgagcgggtcatgaatcactggcaggaagacctgatgtttggctaccagttcctgaatggctgcaaccctgtgttgatccggcgctgcacagagctgcccgagaagctcccggtgaccacggagatggtagagtgcagcctggagcggcagctcagcttggagcaggaggtccagcaagggaacattttcatcgtggactttgagctgctggatggcatcgatgccaacaaaacagacccctgcacactccagttcctggccgctcccatctgcttgctgtataagaacctggccaacaagattgtccccattgccatccagctcaaccaaatcccgggagatgagaaccctattttcctcccttcggatgcaaaatacgactggcttttggccaaaatctgggtgcgttccagtgacttccacgtccaccagaccatcacccaccttctgcgaacacatctggtgtctgaggtttttggcattgcaatgtaccgccagctgcctgctgtgcaccccattttcaagctgctggtggcacacgtgagattcaccattgcaatcaacaccaaggcccgtgagcagctcatctgcgagtgtggcctctttgacaaggccaacgccacagggggcggtgggcacgtgcagatggtgcagagggccatgaaggacctgacctatgcctccctgtgctttcccgaggccatcaaggcccggggcatggagagcaaagaagacatcccctactacttctaccgggacgacgggctcctggtgtgggaagccatcaggacgttcacggccgaggtggtagacatctactacgagggcgaccaggtggtggaggaggacccggagctgcaggacttcgtgaacgatgtctacgtgtacggcatgcggggccgcaagtcctcaggcttccccaagtcggtcaagagccgggagcagctgtcggagtacctgaccgtggtgatcttcaccgcctccgcccagcacgccgcggtcaacttcggccagtacgactggtgctcctggatccccaatgcgcccccaaccatgcgagccccgccaccgactgccaagggcgtggtgaccattgagcagatcgtggacacgctgcccgaccgcggccgctcctgctggcatctgggtgcagtgtgggcgctgagccagttccaggaaaacgagctgttcctgggcatgtacccagaagagcattttatcgagaagcctgtgaaggaagccatggcccgattccgcaagaacctcgaggccattgtcagcgtgattgctgagcgcaacaagaagaagcagctgccatattactacttgtccccagaccggattccgaacagtgtggccatctgagcacactgccagtctcactgtgggaaggccagctgccccagccagatggactccagcctgcctggcaggctgtctggccaggcctcttggcagtcacatctcttcctccgaggccagtacctttccatttattctttgatcttcagggaactgcatagattgtatcaaagtgtaaacaccatagggacccattctacacagagcaggactgcacaggcgtcctgtccacacccagctcagcatttccacaccaagcagcaacagcaaatcacgaccactgatagatgtctattcttgttggagacatgggatgattattttctgttctatttgtgcttagtccaattccttgcacatagtaggtacccaattcaattactattgaatgaattaagaattggttgccataaaaataaatcagttcattt

SEQ ID NO: 3970 - DNA, 5508 bp, Homo sapiens; identical to SEQ ID NO: 430

SEQ ID NO: 3971 - DNA, 2512 bp, Homo sapiens; identical to SEQ ID NO: 2425

SEQ ID NO: 3972 - DNA, 3100 bp, Homo sapiens; identical to SEQ ID NO: 3294

SEQ ID NO: 3973 - DNA, 7720 bp, Homo sapiens
taagttgacacttctcaggttgtcacaagattcaggtatggctcactgttgcaggacataagctgggatctcctgggaattggtctgcttgcaggccctagagagccttccttcttggttgattttcctctagagatccaactgtcttctcaggctcccctgcctgcctcctccttgggtcctttcttgtggcattgccagattactgggcccccattttccctacacttactgccactcatagtctgatggttcccacatctgcatccaacctggactcttcccctgagctttcccctctacaaccaccttccccgggccaagggcacacaggcacctcgacaaaacagtgttctatgtttcttcctgcccaaacctgcccctccctctcccttttcccatctgtggtaccaccatgggctcagagaataaaaaaaatgaaggcttctgtcattgactggggtggagatggagggaagagttagcccagaatcacaggtgctgtagaaaggatacctgagttgccgggagagggggtccatgagttggggatggaaggagagcttggcccttcaaacaattgaagatctgatcaaaagattcagaacatctgtgattttgtggctggtgatgggtgacacctgggctaatggggttgggggagttggtggctctacaatttatggccttgggagatccttgctctctatagctgactgggaggttggaagcctgggctctagcccttgccttgatcctccggatctcattttcctcatctgcctaacaggacagaggggttggaaactgatgagattagctcaaaggatcctggcagctcaggctgcaagatttttttcagacctcagtgtttgggaaaaaattgggtaggtggagcttagggactggccttaggcctgcactgttaattcaccccctcccactaccccatggaggcctggctggtgctcacatacaataattaactgctgagtggccttcgcccaatcccaggctccactcctgggctccattcccactccctgcctgtctcctaggccactaaaccacagctgtcccctggaataaggcaagggggagtgtagagcagagcagaagcctgagccagacggagagccacctcctctcccaggtatgtgacactccccatcccccttcagaggccacacaccctatggcattcccaccatgtgttaaggattttctgaactggaagggccctctgtttgcctgaaggccagagaatcttgaagtggagactgaggcccagaccagagtgtggcctgctcaagattaaacgacaagttagtgttcatccccctgaactagtacctgggctctagcccttcagtccagagctgagttctcagctcttctagtctggggccccaaggttgggtgtgggggtcatgattgttggtggggaggggtcacagctggactaagacctgaaggtgagactaggcaggtgggaaaggagcttgcagagtgatgctgctcaaaaggacaggaagagagcctggcttcagaagcagccacagcaagagagactactgactgaacaggtgggctccactgggggctccggaaaggattttctcagcccccatccccagcactgtgtgttggccgcacccatgagagcctcagcactctgaaggtgcagggggcaaaggccaaaagagctctggcctgaacttgggtggtccctactgtgtgacttggggcatggccctcatctgtgctgaaatgattccacaaagattaaactggctatcatttgttgatttcccccttcttacatttaatccttgcaggagaaagctaagcctcaagatagtttgcttctctttcccccaaggccaaggagaaggtggagtgagggctggggtcgggacaggttgaacgggaaccctgtgctctaaacagttagggtttgttcccgcaggaactgaacccaaaggatcacctggtattccctgagagtacagatttctccggcgtggccctcaaggttagtgagtgagcaggtccacaggggcatgattggatcctggaatgaatgaatcaaccatgagagagtgaatgaacactggaatcaatagagtagcagagtaatggattgtggagcaggaaagagagctgctgggtgggaattcaattccaggcttatatgagccctgctgtgcagtcggcctggagacagcccagctcaggccctgcctagacccctgtcaaggaggccctgtcaagaggagaggaggggcagcacgggggcaaggcaagcttgtgagcgggaaaggcatgtccactttagcgactggtatgtggaagatgagttagaggagacagatggagagaagtcataggaaataaattctgagcattttaggagggcccagacacctggtgtccagtggagtgaaggaaacagtcgcctcccaaaattcagtgtctgaggtcaaaggattgaagttctgtgatgaccaaggagaagccagctctgtggtagggggcacaggagctccccaaggccccagggctgtccagctggctgtcccctgccagcacccatgtcctgtgaccccaccccaccaagatcccatggtttccgggaagggcctactaaactagcttgagtgatgaggctagaaaggggctgggaccaaggtttaaaaagcaaaacaaactaacaaaaaccacactgcagcccccccaactaaaacatttttataaactttttttttttttttgagatggagtctcgctctgtcacccaggctagagtgcaatggcacaatcttggctcactgtaacctccacctcctggattcaagtgattctcctgcctcagcctcccacgtagctgggactacaggcacacgacaccgcacccagctcattttgtatttttagtagagacagggtttcactatgttggccaggctggtctcaaacttctgacctcaggtgatccacccacctcagccttccaaagtgctgggattacaggcatgagccaccgcgcccagcccatttttgtaaacttttacaatgaagtaatttggtgtcaaaatctgacctgaaaattaatgtgagtttatgtatagttttaatttatcccactagtgtaactgtttcaccccagaatatacacttgattattgggtatatgaaaaaaatattttctttgaatcacctttgatgaaatcctaaaaaattttaaccctgaaacatttgaataaggcattgtggacctatggcaaactcctggctatttctgcattttgcccaaatccatccttgaattatatcacctgaacctcgtgaccacctggagaaggcaatgaggctcaagccagggaggggtggtgtctaatcctacctttcattggatctgggaaaactgagggagatgggggcagggctctatctgccccaggcttccgtccaggccccaccctcctggagccctgcacacaacttaaggccccacctccgcattccttggtgccactgaccacagctctttcttcagggacagacatggctcagcggatgacaacacagctgctgctccttctagtgtgggtggctgtagtaggggaggctcagacaaggattgcatgggccaggactgagcttctcaatgtctgcatgaacgccaagcaccacaaggaaaagccaggccccgaggacaagttgcatgagcaggtgggccagggggtgatctggggtggtgagggactggctcaggaagaggaaacgaggacatggaaatgccaaaccccattggcactggtgaactgaagtggaggagcccttcagtttgcattaatatgggtgacttatttcagagacactgtgccaaatgtcggtacaatgccaacagttcaccttcttggttgttgagtttccgcattacagaaataaggaagcaggcccaaaggagagcctgggaaatgaagttggagtgacccatcctggggttgcttgatttagggatttagactgggaatgactcctccaaagatctgagggaagaaactgcacactgtgcatagtggcctcttttctgccagccctaaacagctcaagaagggagagtctctcacattatgaggctgtgtgcaaagcattcttttttttttttcctgagacaaagtctccatatgttgcccaggctggtctcaaattcctggactcaagtgatcctcccacctcagccctcccaaagtgtgggattacagaaatgagccgtacgccctcctgaagcatcttggttcatgcatctcgcaaaactttgggctgtgtctctcgaccacattggacctgaggtctccctataacatttattttgctaccacccctttaatatcctgaacatgatgatataactaaagaaaaagcagaggaaaagtaatttgtaggccaggtgttacggctcacgcctgtaatcccaacactgtgggatgtcgagatgggcagatcacttgagctcaggagttcgagaccagcctgggcaagatggcaaaaccccatctctactaaaaaataaaaaaaattagtcaggtgtggtggcacatgcctgcagtcccagctactcaggaggctgaggtgggcaggtcagttgagcccaggaggcagagattgtagatcgtgccactgcactccagcctgggcaacagagtgagaccttgtcaaaagaaagaaagaacgaaaaaaagaaagaaaggaaggaaggaaggggaggaaggaaagggagggaggaaagggagggaggaaagggagggaggcaagggagagaaacttgtaatacgcatttctttttttttttcttgagatagagttttgctcttgttgcccagggtggatggcagtggcacaatctcagctcactgcaacctccacctcccaggttcaagtgattctcctgcctcagcctcctgagtaggcacacgccaccacacccagctaattttttgtttgtttgtttgttttgtttgttggtatttttagtagagatgggggtttcaccatgttggccaggctggtctcgaactcctcacctcataatccgcccctcttggcctcccaaagtgctgagattacaggtgtgagccactgcgcccggccttaagtgcacattttatttatttatttatttatttatttattgagatggagtcttgctctgttgcccaggctggagtgcagtggcacaatctcagctcactgcaacctccacctcccaggttcaagcaattcttctgccttggcctccagagtagctgggactataggcacctgccaccatgcctagctaatttttgtatttttagtagaaatggggttttgccatgttggccaggctggtctccattcttgaccttaagtgatctgtccacctccacctcccaaagtgctgggattacaggcactatgtgagccactgtgccggcccacattttaatatttagcttgtcagccttaagtaatgagattcaggaagcttgaggataggcacacaggagcatagtttcaagttgtcctgaattttgcagccatcacaagttagtttttaaggaaaaagattagttcctaagttgtttctcaataacttataataaaataacatccacaattgattggctatacattgtttttttgtatcacaaattccacaaacagataatgggtgaggcagctagtcagggacaaaacacttcccaagtagctgggattacaggtgtccgccaccacacttggctagttttttgtttgtttattttttgagatggagtcttgctctgtcgcccaggctggagtgcagtggcatgatctcggctcactgcaagctccacctgccgggttcacaccattctcctgcctcagcctcccaagtagctgggactacaggtgccagccaccacgcccggctaattttttgtatttttagtagagacggggtttcaccatgttggccaggatggtcttgatctcttagcctcgtgatccacccgcctcggcctcccaaaatgctgggattacaggcgtgagccaccgcacccggcctaatttttatatttttagtagagacggggtttcaccatgttggccaggctggtctcaaactcttgatctcaggtgatccacctgccttggcctcccaaagtgctgggattacacaagtaagccactgcacccagcctggggttacaatttaaattgcttttttaccttcaaatctttgacacctcagtgaggcttaatctgaccgcactattacactacaagtccccatccgtctctgcttaatttttgtccaaagcaaaaatcaggtgatgtgttcattgttgtaaccccagtttctacaaaagtacctgggtgagagtaagtaggatctcaataaaggttgaattaacaaattttgtaatgactgcaactccagcaggagctcccttttgggctcccactgtctctgacggccctctcccctaaagaggtcccaatagcaagtattttcctgggtgacttccagtgggctggggaatcaaggactaagaggggagacactgcatgtggaatattctggctgtgctggctgtgctggctgtggactgagtcctctgtcttcccccatccagtgtcgaccctggaggaagaatgcctgctgttctaccaacaccagccaggaagcccataaggatgtttcctacctatatagattcaactggaaccactgtggagagatggcacctgcctgcaaacggcatttcatccaggacacctgcctctacgagtgctcccccaacttggggccctggatccagcaggtatgcatggcttcctgcaggtacaagacctagcggagcagctgagctttccaggcatctctgcaggctgcaaccccagctccagttctattcggggctgagttgctgggattcttgaacctgagcccttcttttgtatcaaaatcacccaggtggatcagagctggcgcaaagagcgggtactgaacgtgcccctgtgcaaagaggactgtgagcaatggtgggaagattgtcgcacctcctacacctgcaagagcaactggcacaagggctggaactggacttcaggtgagggctggggtgggcaggaatggagggatttggaagtggaggtgtgtgggtgtggaacaggtatgtgacaatttggagttgtagggctggcagacctcaagatagttccgggcccagtggctaaaggtcttccctcctctctacagggtttaacaagtgcgcagtgggagctgcctgccaacctttccatttctacttccccacacccactgttctgtgcaatgaaatctggactcactcctacaaggtcagcaactacagccgagggagtggccgctgcatccagatgtggttcgacccagcccagggcaaccccaatgaggaggtggcgaggttctatgctgcagccatgagtggggctgggccctgggcagcctggcctttcctgcttagcctggccctaatgctgctgtggctgctcagctgacctccttttaccttctgatacctggaaatccctgccctgttcagccccacagctcccaactatttggttcctgctccatggtcgggcctctgacagccactttgaataaaccagacaccgcacatgtgtcttgagaattatttgg

SEQ ID NO: 3974 - DNA, 1800 bp, Homo sapiens; identical to SEQ ID NO: 256

SEQ ID NO: 3975 - DNA, 874 bp, Homo sapiens; identical to SEQ ID NO: 2043

SEQ ID NO: 3976 - DNA, 838 bp, Homo sapiens; identical to SEQ ID NO: 2051

SEQ ID NO: 3977 - DNA, 2279 bp, Homo sapiens; identical to SEQ ID NO: 3296

SEQ ID NO: 3978 - DNA, 2834 bp, Homo sapiens; identical to SEQ ID NO: 311

SEQ ID NO: 3979 - DNA, 655 bp, Homo sapiens; identical to SEQ ID NO: 139

SEQ ID NO: 3980 - DNA, 3128 bp, Homo sapiens; identical to SEQ ID NO: 2063

SEQ ID NO: 3981 - DNA, 463 bp, Homo sapiens
  misc_feature (1)..(463): n=a,t,g or c
tgcaaatgtccttaactgagaggcactgagcagaaagaagaacacaattgcatctccattatcttcatctgggccaccagataccagccacccactctctcagacaatggcagaaaggacaagccagcccccagggacccggccctgccagcttacctgttggcacacctcccctgagcactgcagcctcaccaactgtctggggtccctgagactgcctgctcacactcacctctgagccttcctgtctgctgttccctctgcctggaacatcctctccactcccccttaagaacccctctaagcagctgtcctggctgactgctaattgggcttttaggattcaagggaaggcatcctggctttgggtggcttcctttgaatggggcaaaagatcnaagtttagggggtctttctctnggttgcttaatcctcaataggaacttggntcccggatgttaca

SEQ ID NO: 3982 - DNA, 419 bp, Homo sapiens
  misc_feature (1)..(419): n=a,t,g or c
ggatngncactagaaactgctgctggaaacgggcggcggctccacttagggattcctgaagcagtgtttgtggaagatgtagattctttcatgaagcagcctgggaatgagactgcagatacagtgttaaagaagctggatgaacaataccagaagtataagtttatggaactcaaccttgctcagaaaaaaaggaggctgaaaggtcagattcctgaaattaaacagactttggaaattctgaaatacatgcagaagaaaaaagagtctaccaattcaatggagacgagattcttactggcccgataacctgtactgcaaacttcagtccctcctactgataaagtatgcctatggttgggggctaatgtaatgcttgaatatgatattgatgaagctcaggccttgttgggaaaaga

SEQ ID NO: 3983 - DNA, 914 bp, Homo sapiens
  misc_feature (1)..(914): n=a,t,g or c
ggcacgagctgtaaaccaaaagaggttactaagcaaaaccacctaaatttaagttggtgatttaaatgaatctcacattaaaagaaagcttgacagtgttatgaaagccaccagactcagccagtgtgtccccatgggtatccccagccatccttgctcaatccattacttatatactaactacataatgacctgttcaaaccagactctatttaatgaactgtgaatttacacagaggccattttaaatgggtcaccccatttaggattagtggatctcaaattattaaccaaacatcactccatttcaaagtaaaatattccaccagcgatttgatttattggctcttccattgccactgagcaatgcccaggaagcaggcacattgccaaggactgggggcatcttgactaggaagctcctcgtttgtgtgagcgtgggtcagaccgccaaagtaggacttcatcgtttacctacctattatcaatatggtgcttgaatatattcctataactgtagaacagtgtggaaagtgatggtaactttgaagttgttcatgtattattggctttgttttaattgacactagtagagtgtaactggtctgtgtgtagattgaatgcttttcgatgttttggtctcttaaaagttaagatgatagacctcataatgtgctgttattggcagtaagaagaagagaaaggtcttatagcgcgcagcttcgttatggggatatcgtgcgccgcgtttaagggcgggaactcggccgcgatgctgtggagcctctgcagcgtgaagacccgcgctctagccgtaggaagccttgggacaggntggtggagatacgcaggtgttcttagagccaaacgtgtgttcgcatagggctgcttcggttgcacatctgggcaccgaa

SEQ ID NO: 3984 - DNA, 335 bp, Homo sapiens
ggtggattttcctacagctattggtatggtggtagaaagagatgacggaagcacattaatggaaatagatggcgataaggcaaacaaggcggtccacctactacatagatactaatgctctgcgtgttccgagggagaatatgaggccatttcacctctaaaaaatgggatggttgaagactggatagtttccaagctattttggatcatacctacaaaatgcatgtcaaatcagaagccagtctccatcctgttctcatgtcagaggcaccctggaatactagagcaaagagagagaaactaacagatttaatgtgtgacactacaacatccct

SEQ ID NO: 3985 - DNA, 324 bp, Homo sapiens
cctcggtcttgggctccactgggcccctggctccgggagcggcccctggctatgcacccccaccattcctacacatcttgccagcccaccagcagccccactcacagctgctgcaccaccaccttccgcaggatgcacagagtggctcgggtcagcgcaccagcccagctccctgcagcccaagtctcaagcctccaaacctgcctacggaactctccatactggacaaactaaacccagaagagaggggtgggctggggcaaggcttatcctgggcaggagagaacacacgagcacgtatttgggagcccagtgccctttcct

SEQ ID NO: 3986 - DNA, 427 bp, Homo sapiens
catttttatcagtattgtgaataaacttgaacacaaatacacgagttccatgtcatgtcttcagttgtagaagtttttcctctttaaggtaaagcgaccaacttgaactttctctggcaacacgattcgcagttatataagggaatcagtgttcacgtctctgtatatatttatttatgtgtaatttaatgggaattgtaaatatggtgagtctgttttaagccttttttttttttatttatctgatcttgtttacctcttgtttagtgggttttgaatcttccctattagttcttcatgtggttcatggtactgatttagaaatccagtgtttgggggatttttttctctgggattcatgaatttagccctgttgtagcatggtaaaggtgacaaacagctggacaaatttttaaaaagtaaaata

SEQ ID NO: 3987 - DNA, 2061 bp, Homo sapiens
atgacgcccgccctcacagccctgctctgccttgggctgagtctgggccccaggacccgcgtgcaggcagggcccttccccaaacccaccctctgggctgagccaggctctgtgatcagctgggggagccccgtgaccatctggtgtcaggggagcctggaggcccaggagtaccaactggataaagagggaagcccagagcccttggacagaaataacccactggaacccaagaacaaggccagattctccatcccatccatgacacagcaccatgcagggagataccgctgccactattacagctctgcaggctggtcagagcccagcgaccccctggagctggtgatgacaggagcctatagcaaacccaccctctcagccctgcccagccctgtggtggcctcaggggggaatatgaccctccgatgtggctcacagaagagatatcaccattttgttctgatgaaggaaggagaacaccagctcccccggaccctggactcacagcagctccacagtggggggttccaggccctgttccctgtgggccccgtgaaccccagccacaggtggaggttcacatgctattactattatatgaacaccccccgggtgtggtcccaccccagtgaccccctggagattctgccctcaggcgtgtctaggaagccctccctcctgaccctgcagggccctgtcctggcccctgggcagagcctgaccctccagtgtggctctgatgtcggctacgacagatttgttctgtataaggagggggaacgtgacttcctccagcgccctggccagcagccccaggctgggctctcccaggccaacttcaccctgggccctgtgagcccctccaatgggggccagtacaggtgctacggtgcacacaacctctcctccgagtggtcggcccccagcgaccccctgaacatcctgatggcaggacagatctatgacaccgtctccctgtcagcacagccgggccccacagtggcctcaggagagaacgtgaccctgctgtgtcagtcatggtggcagtttgacactttccttctgaccaaagaaggggcagcccatcccccactgcgtctgagatcaatgtacggagctcataagtaccaggctgaattccccatgagtcctgtgacctcagcccacgcggggacctacaggtgctacggctcacgcagctccaacccctacctgctgtctcaccccagtgagcccctggagctcgtggtctcaggacactctggaggctccagcctcccacccacagggccgccctccacacctggtctgggaagatacctggaggttttgattggggtctcggtggccttcgtcctgctgctcttcctcctcctcttcctcctcctccgacgtcagcgtcacagcaaacacaggacatctgaccagagaaagactgatttccagcgtcctgcaggggctgcggagacagagcccaaggacaggggcctgctgaggaggtccagcccagctgctgacgtccaggaagaaaacctctatgctgccgtgaaggacacacagtctgaggacggggtggagctggacagtcagagcccacacgatgaagacccccaggcagtgacgtatgccccggtgaaacactccagtcctaggagagaaatggcctctcctccctcctcactgtctggggaattcctggacacaaaggacagacaggtggaagaggacaggcagatggacactgaggctgctgcatctgaagcctcccaggatgtgacctacgcccagctgcacagcttgacccttagacggaaggcaactgagcctcctccatcccaggaaggggaacctccagctgagcccagcatctacgccactctggccatccactagcccggggggtacgcagaccccacactcagcagaaggagactcaggactgctgaaggcacgggagctgcccccagtggacaccagtgaaccccagtcagcctggacccctaacacagaccatgaggagacgctgggaacttgtgggactcacctgactcaaagatg

SEQ ID NO: 3988 - DNA, 2697 bp, Homo sapiens
gctgagcagtcaacagcatttcttgttccaagatcacccttctgagtacctctctggctgccaaattgccagggccttcacagtttgattccattctcagctccaagcattaggtaaacccaccaagcaatcctagcctgtgatggcgtttgacgtcagctgcttcttttgggtggtgctgttttctgccggctgtaaagtcatcacctcctgggatcagatgtgcattgagaaagaagccaacaaaacatataactgtgaaaatttaggtctcagtgaaatccctgacactctaccaaacacaacagaatttttggaattcagctttaattttttgcctacaattcacaatagaaccttcagcagactcatgaatcttacctttttggatttaactaggtgccagattaactggatacatgaagacacttttcaaagccatcatcaattaagcacacttgtgttaactggaaatcccctgatattcatggcagaaacatcgcttaatgggcccaagtcactgaagcatcttttcttaatccaaacgggaatatccaatctcgagtttattccagtgcacaatctggaaaacttggaaagcttgtatcttggaagcaaccatatttcctccattaagttccccaaagacttcccagcacggaatctgaaagtactggattttcagaataatgctatacactacatctctagagaagacatgaggtctctggagcaggccatcaacctaagcctgaacttcaatggcaataatgttaaaggtattgagcttggggcttttgattcaacggtcttccaaagtttgaactttggaggaactccaaatttgtctgttatattcaatggtctgcagaactctactactcagtctctctggctgggaacatttgaggacattgatgacgaagatattagttcagccatgctcaagggactctgtgaaatgtctgttgagagcctcaacctgcaggaacaccgcttctctgacatctcatccaccacatttcagtgcttcacccaactccaagaattggatctgacagcaactcacttgaaagggttaccctctgggatgaagggtctgaacttgctcaagaaattagttctcagtgtaaatcatttcgatcaattgtgtcaaatcagtgctgccaatttcccctcccttacacacctctacatcagaggcaacgtgaagaaacttcaccttggtgttggctgcttggagaaactaggaaaccttcagacacttgatttaagccataatgacatagaggcttctgactgctgcagtctgcaactcaaaaacctgtcccacttgcaaaccttaaacctgagccacaatgagcctcttggtctccagagtcaggcattcaaagaatgtcctcagctagaactcctcgatttggcatttacccgcttacacattaatgctccacaaagtcccttccaaaacctccatttccttcaggttctgaatctcacttactgcttccttgataccagcaatcagcatcttctagcaggcctaccagttctccggcatctcaacttaaaagggaatcactttcaagatgggactatcacgaagaccaacctacttcagactgtgggcagcttggaggttctgattttgtcctcttgtggtctcctctctatagaccagcaagcattccacagcttgggaaaaatgagccatgtagacttaagccacaacagcctgacatgcgacagcattgattctcttagccatcttaagggaatctacctcaatctggctgccaacagcattaacatcatctcaccccgtctcctccctatcttgtcccagcagagcaccattaatttaagtcataaccccctggactgcacttgctcgaatattcatttcttaacatggtacaaagaaaacctgcacaaacttgaaggctcggaggagaccacgtgtgcaaacccgccatctctaaggggagttaagctatctgatgtcaagctttcctgtgggattacagccataggcattttctttctcatagtatttctattattgttggctattctgctattttttgcagttaaataccttctcaggtggaaataccaacacatttagtgctgaaggtttccagagaaagcaaataagtgtgcttagcaaaattgctctaagtgaaggaactgtcatctgctggtgaccagaccagacttttcagattgcttcctggaactgggcagggactcactgtgcttttctgagcttcttactcctgtgagtcccagagctaaagaaccttctaggcaagtacaccgaatgactcagtccagagggtcagatgctgctgtgagaggcacagagccctttccgcatgtggaagagtgggaggaagcagagggagggactgggcagggactgccggccccggagtctcccacagggaggccattccccttctactaccgacatccctcccagcaccacacaccccgcccctgaaaggagatcatcagcccccacaatttgtcagagctgaagccagcccactacccacccccactacagcattgtgcttgggtctgggttctcagtaaatgtagccatttgagaaacttacttggggacaaagtctcaatccttattttaaatgaaaaaagaaaagaaaagcataataaatttaaaagaaaagg

SEQ ID NO: 3989 - DNA, 492 bp, Homo sapiens; identical to SEQ ID NO: 3073
  misc_feature (1)..(492): n=a,t,g or c

SEQ ID NO: 3990 - DNA, 894 bp, Homo sapiens
cagtctcaatgggggcactggggctggagggcaggggtgggaggctccaggggaggggttccctcctgctagctgtggcaggagccacttctctggtgaccttgttgctggcggtgcctatcactgtcctggctgtgctggccttagtgccccaggatcagggaggactggtaacggagacggccgaccccggggcacaggcccagcaaggactggggtttcagaagctgccagaggaggagccagaaacagatctcagccccgggctcccagctgcccacctcataggcgctccgctgaaggggcaggggctaggctgggagacgacgaaggaacaggcgtttctgacgagcgggacgcagttctcggacgccgaggggctggcgctcccgcaggacggcctctattacctctactgtctcgtcggctaccggggccgggcgccccctggcggcggggacccccagggccgctcggtcacgctgcgcagctctctgtaccgggcggggggcgcctacgggccgggcactcccgagctgctgctcgagggcgccgagacggtgactccagtgctggacccggccaggagacaagggtacgggcctctctggtacacgagcgtggggttcggcggcctggtgcagctccggaggggcgagagggtgtacgtcaacatcagtcaccccgatatggtggacttcgcgagagggaagaccttctttggggccgtgatggtggggtgagggaatatgagtgcgtggtgcgagtgcgtgaatattgggggcccggacgcccaggaccccatggcagtgggaaaaatgtaggagactgtttggaaattgattttgaacctgatgaaaataaagaatggaaagcttcagtgctgccgataaa

SEQ ID NO: 3991 - DNA, 7011 bp, Homo sapiens; identical to SEQ ID NO: 443

SEQ ID NO: 3992 - DNA, 3175 bp, Homo sapiens
tgcttaaaaaaacacaacaggattttcgaagaatcctttcttagaaaacaaacaaaaaaaccaaacaaaaacgtactttctccccactagtttacaccacaggaagcgagagagctgctgccactgctgctaccacaggaagacacagcagggagaagccctagtgcctctgccggctgcccaggacctggtatcggcccacagaccaagtcctccacagagggcgagccagggtggagaagagccagcccagtgacccaaacatccccgataaaacacccactgcttaagaggcaggctcggatggactatagctttgataccacagccgaagacccttgggttaggatttctgactgcatcaaaaacttatttagccccatcatgagtgagaaccatggccacatgcctctacagcccaatgccagcctgaatgaagaagaagggacacagggccacccagatgggaccccaccaaagctggacaccgccaatggcactcccaaagtttacaagtcagcagacagcagcactgtgaagaaaggtcctcctgtggctcccaagccagcctggtttcgccaaagcttgaaaggtttgaggaatcgtgcttcagagccaagagggctccctgatcctgccttgtccacccagccagcacctgcttccagggagcacctaggatcacacatccgggcctcctcctcctcctcctccatcaggcagagaatcagctcctttgaaacctttggctcctctcaactgcctgacaaaggagcccagagactgagcctccagccctcctctggggaggcagcaaaacctcttgggaagcatgaggaaggacggttttctggactcttggggcgaggggctgcacccactcttgtgccccagcagcctgagcaagtactgtcctcggggtcccctgcagcctccgaggccagagacccaggtgtgtctgagtcccctcccccagggcggcagcccaatcagaaaactttcccccctggcccggacccgctcctaaggctgctgtcaacacaggctgaggaatctcaaggcccagtgctcaagatgcctagccagcgagcacggagcttccccctgaccaggtcccagtcctgtgagacgaagctacttgacgaaaagaccagcaaactctattctatcagcagccaagtgtcatcggctgtcatgaaatccttgctgtgccttccatcttctatctcctgtgcccagactccctgcatccccaaggcaggggcatctccaacatcatcatccaacgaagactcagctgcaaatggttctgctgaaacatctgccttggacacggggttctcgctcaacctttcagagctgagagaatatacagagggtctcacggaagccaaggaagacgatgatggggaccacagttcccttcagtctggtcagtccgttatctccctgctgagctcagaagaattaaaaaaactcatcgaggaggtgaaggttctggatgaagcaacattaaagcaattagacggcatccatgtcaccatcttacacaaggaggaaggtgctggtcttgggttcagcttggcaggaggagcagatctagaaaacaaggtgattacggttcacagagtgtttccaaatgggctggcctcccaggaagggactattcagaagggcaatgaggttctttccatcaacggcaagtctctcaaggggaccacgcaccatgatgccttggccatcctccgccaagctcgagagcccaggcaagctgtgattgtcacaaggaagctgactccagaggccatgcccgacctcaactcctccactgactctgcagcctcagcctctgcagccagtgatgtttctgtagaatctacagcagaggccacagtctgcacggtgacactggagaagatgtcggcagggctgggcttcagcctggaaggagggaagggctccctacacggagacaagcctctcaccattaacaggattttcaaaggagcagcctcagaacaaagtgagacagtccagcctggagatgaaatcttgcagctgggtggcactgccatgcagggcctcacacggtttgaagcctggaacatcatcaaggcactgcctgatggacctgtcacgattgtcatcaggagaaaaagcctccagtccaaggaaaccacagctgctggagactcctaggcaggacatgctgaagccaaagccaataacacacagctaacacacagctcccataaccgctgattctcagggtctctgctgccgccccacccagatgggggaaagcacaggtgggcttcccagtggctgctgcccaggcccagaccttctaggacgccacccagcaaaaggttgttcctaaaataagggcagagtcacactggggcagctgatacaaattgcagactgtgtaaaaagagagcttaatgataatattgtggtgccacaaataaaatggatttattagaattccatatgacattcatgcctggcttcgcaaaatgtttcaagtactgtaactgtgtcatgattcacccccaaacagtgacatttatttttctcatgaatctgcaatgtgggcagagattggaatgggcagctcatctctgtcccacttggcatcagctggcgtcatgcaaagtcatgcaaaggctgggaccacctgagatcattcactcatacatctggccgttgatgttggctgggaactcacctggggctgctggcctgaatgcttataggtggcctctccttgtggcctgggctcctcacaacatggtgtctggattcccaggatgagcatcccaggatcgcaagagccacgtagaagctgcatcttgtttatacctttgccttggaagttgcatggcatcacctccaccatactccatcagttagagctgacacaaacctgcctgggtttaaggggagaggaaatattgctggggtcatttatgaaaaatacagtttgtcacatgaaacatttgcaaaattgtttttggttggattggagaagtaatcctagggaagggtggtggagccagtaaatagaggagtacaggtgaagcaccaagctcaaagcgtggacaggtgtgccgacagaaggaaccagcgtgtatatgagggtatcaaataaaattgctactacttacctacc

SEQ ID NO: 3993 - DNA, 2838 bp, Homo sapiens; identical to SEQ ID NO: 3727

SEQ ID NO: 3994 - DNA, 401 bp, Homo sapiens
  misc_feature (1)..(401): n=a,t,g or c
aaaccccagcgcagtnctcttcctcctgctactctggctcccagataccaccggagaaattgtgttgacgcagctccaggcaccctgtctttgtctccaggggaaagagccaccctctcctgcagggccagtcagagtgttagcagcagctacttagcctggtaccagcagaaacctgggccaggctcccaggctcctcatctatggtgcatccagcagggccactggcattcccagacaggttcagtggcagtgggtctggggacagatttcactcttcaccattcagcagactgggagcctgaagatttttgcagtgtatttactgttcagcagtattggtagctcaccgttcacttttcgggcggagggaccaaggttggagatcaaacgaatttttg

SEQ ID NO: 3995 - DNA, 316 bp, Homo sapiens; identical to SEQ ID NO: 483
  misc_feature (1)..(316): n=a,t,g or c

SEQ ID NO: 3996 - DNA, 498 bp, Homo sapiens; identical to SEQ ID NO: 3589

SEQ ID NO: 3997 - DNA, 1234 bp, Homo sapiens
tagttcaagacaacagagacaaagctaagatgaggaagttctgtacagtttaggaaatagaggctttcaaagataattcgcagtgatgtgaaactggcctcccaagccctgataacaacatggccaacgccctggccagcgccacttgcgagcgctgcaagggcggctttgcgcccgctgagaagatcgtgaacagtaatggggagctgtaccatgagcagtgtttcgtgtgcgctcagtgcttccagcagttcccagaaggactcttctatgagtttgaaggaagaaagtactgtgaacatgactttcagatgctctttgccccttgctgtcatcagtgtggtgaattcatcattggccgagttatcaaagccatgaataacagctggcatccggagtgcttccgctgtgacctctgccaggaagttctggcagatatcgggtttgtcaagaatgctgggagacacctgtgtcgcccctgtcataatcgtgagaaagccagaggccttgggaaatacatctgccagaaatgccatgctatcatcgatgagcagcctctgatattcaagaacgacccctaccatccagaccatttcaactgcgccaactgcgggaaggagctgactgccgatgcacgggagctgaaaggggagctatactgcctcccatgccatgataaaatgggggtccccatctgtggtgcttgccgacggcccatcgaagggcgcgtggtgaacgctatgggcaagcagtggcatgtggagcattttgtttgtgccaagtgtgagaaaccctttcttggacatcgccattatgagaggaaaggcctggcatattgtgaaactcactataaccagctatttggtgatgtttgcttccactgcaatcgtgttatagaaggtgatgtggtctctgctcttaataaggcctggtgcgtgaactgctttgcctgttctacctgcaacactaaattaacactcaagaataagtttgtggagtttgacatgaagccagtctgtaagaagtgctatgagatttccattggagctgaagaaaagacttaagaaactagctgagaccttaggaaggaaataagttcctttattttttcttttctatgcaagataagagattaccaacattacttgtcttgatctacccatatttaaagctatatctcaaagcagttgagagaagaggacctatatgaatggttttatgtcatttttttaaa

SEQ ID NO: 3998 - DNA, 571 bp, Homo sapiens
gttccatttctatgggtttggacaccgatgtagattatgaaactgcatttattcattaccgtctggcttctgagcagcaacacagtgcacaagctatgtttaatctgggatatatgcatgagaaaggactgggcattaaacaggatattcaccttgcgaaacgtttttatgacatggcagctgtaagccagcccagatgcacaagttccagtcttcctagccctctgcaaattgggcatcgtctatttcttgcagtacatacgggaaacaaacattcgagatatgttctcccaacttgatatggaccagcttttgggacctgagtgggacctttacctcatgaccatcattgcgctctgttgggaagtcatagcttacaggcaaaggcagcaccaagacatgcctgcacccaggcctccagggccacggccagctccaccccagcaggaggggccaccagagcagcagccaccacagtaataggcactgggtccagccttgatcagtgacagcgaaggaagttatctgctgggaacacttgcatttgatttaggaccttggggatccgatg

SEQ ID NO: 3999 - DNA, 1505 bp, Homo sapiens
  misc_feature (1)..(1505): n=a,t,g or c
tttacagggcataactcattttatccttaccacaatcctatgaagtaggaacttttataaaacgcattttatatncaagggcacagagaggntaattaacttgccctctggtcacacagctaggaagtgggcagagtacagatttacactaggcatccgtctcctgnccccacatanccagctgctgtaaacccataccggcggccaagcagcctcaatttgtgcatgcacccacttcccagcaagacagcagctcccaagttcctcctgtttagaattttagaagcggcgggccaccaggctgcagtctcccttgggtcaggggtcctggttgcactccgtgctttgcacaaagcaggctctccatttttgttaaatgcacgaatagtgctaagctgggaagttcttcctgaggtctaacctctagctgctcccccacagaagagtgcctgcggccagtggccaccaggggtcgccgcagcacccagcgctggagggcggagcgggcggcagacccggagcagcatgtggactctcgggcgccgcgcagtagccggcctcctggcgtcacccagcccggcccaggcccagaccctcacccgggtcccgcggccggcagagttggccccactctgcggccgccgtggcctgcgcaccgacatcgatgcgacctgcacgccccgccgcgcaagttcgaaccaacgtggcctcaaccagatttggaatgtcaaaaagcagagtgtctatttgatgaatttgaggaaatctggaactttgggccacccaggctctctagatgagaccacctatgaaagactagcagaggaaacgctggactctttagcagagttttttgaagaccttgcagacaagccatacacgtttgaggactatgatgtctcctttgggagtggtgtcttaactgtcaaactgggtggagatctaggaacctatgtgatcaacaagcagacgccaaacaagcaaatctggctatcttctccatccagtggacctaagcgttatgactggactgggaaaaactgggtgttctcccacgacggcgtgtccctccatgagctgctggccgcagagctcactaaagccttaaaaaccaaactggacttgtcttggttggcctattccggaaaagatgcttgatgcccagccccgttttaaggacattaaaagctatcaggccaagaccccagcttcattatgcagctgaggtgtgttttttgttgttgttgttgtttattttttttattcctgcttttgaggacacttgggctatgtgtcacagctctgtacaaacaatgtgttgcctcctaccttgcccccaagttctgatttttaatttctatggaagattttttggattgtcggatttcctccctcacatgataccccttatcttttataatgtcttatgcctatacctgaatataacaacctttaaaaaagcaaaataataagaaggaaaaattccaggagggaaaaaaaaaaaa

SEQ ID NO: 4000 - DNA, 14796 bp, Homo sapiens
tctagacatgcggatatattcaagctgggcacagcacagcagccccaccccaggcagcttgaaatcagagctggggtccaaagggaccacaccccgagggactgtgtgggggtcggggcacacaggccactgcttccccccgtctttctcagccattcctgaagtcagcctcactctgcttctcagggatttcaaatgtgcagagactctggcacttttgtagaagccccttctggtcctaacttacacctggatgctgtggggctgcagctgctgctcgggctcgggaggatgctgggggcccggtgcccatgagcttttgaagctcctggaactcggttttgagggtgttcaggtccaggtggacacctgggctgtccttgtccatgcatttgatgacattgtgtgcagaagtgaaaaggagttaggccgggcatgctggcttatgcctgtaatcccagcactttgggaggctgaggcgggtggatcacgaggtcaggagttcaataccagcctggccaagatggtgaaaccccgtctctactaaaaatacaaaaaaattagccgggcatggtggcgggcgcatgtaatcccagctactgggggggctgaggcagagaattgctggaacccaggagatggaggttgcagtgagccaagattgtgccactgcactgcactccagcctggcgacagagcaagactctgtctcaaaaaaaaaaaaaaaaagtgaaaaggagttgttcctttcctccctcctgagggcaggcaactgctgcggttgccagtggaggtggtgcgtccttggtctgtgcctgggggccaccccagcagaggccatggtggtgccagggcccggttagcgagccaatcagcaggacccaggggcgacctgccaaagtcaactggatttgataactgcagcgaagttaagtttcctgattttgatgattgtgttgtggttgtgtaagagaatgaagtatttcggggtagtatggtaatgccttcaacttacaaacggttcaggtaaaccacccatatacatacatatacatgcatgtgatatatacacatacagggatgtgtgtgtgttcacatatatgaggggagagagactaggggagagaaagtaggttggggagagggagagagaaaggaaaacaggagacagagagagagcggggagtagagagagggaaggggtaagagagggagaggaggagagaaagggaggaagaagcagagagtgaatgttaaaggaaacaggcaaaacataaacagaaaatctgggtgaagggtatatgagtattctttgtactattcttgcaattatcttttatttaaattgacatcgggccgggcgcagtggctcacatctgtaatcccagcactttgggaggccgaggcaggcagatcacttgaggtcaggagtttgagaccagcctggcaaacatggtgaaaccccatctctactaaaaatacaaaaattagcctggtgtggtggtgcatgcctttaatctcagctactcgggaggctgaggcaggagaatcgcttgaacccgtggcggggaggaggttgcagtgagctgagatcatgccactgcactccagcctgggcgatagagcgagactcagtttcaaataaataaataaacatcaaaataaaaagttactgtattaaagaatgggggcggggtgggaggggtggggagaggttgcaaaaataaataaataaataaataaaccccaaaatgaaaaagacagtggaggcaccaggcctgcgtggggctggagggctaataaggccaggcctcttatctctggccatagaaccagagaagtgagtggatgtgatgcccagctccagaagtgactccagaacaccctgttccaaagcagaggacacactgattttttttttaataggctgcaggacttactgttggtgggacgccctgctttgcgaagggaaaggaggagtttgccctgagcacaggcccccaccctccactgggctttccccagctcccttgtcttcttatcacggtagtggcccagtccctggcccctgactccagaaggtggccctcctggaaacccaggtcgtgcagtcaacgatgtactcgccgggacagcgatgtctgctgcactccatccctcccctgttcatttgtccttcatgcccgtctggagtagatgctttttgcagaggtggcaccctgtaaagctctcctgtctgactttttttttttttttagactgagttttgctcttgttgcctaggctggagtgcaatggcacaatctcagctcactgcaccctctgcctcccgggttcaagcgattctcctgcctcagcctcccgagtagttgggattacaggcatgcaccaccacgcccagctaatttttgtatttttagtagagacaaggtttcaccgtgatggccaggctggtcttgaactccaggactcaagtgatgctcctgcctaggcctctcaaagtgttgggattacaggcgtgagccactgcacccggcctgcacgcgttctttgaaagcagtcgagggggcgctaggtgtgggcagggacgagctggcgcggcgtcgctgggtgcaccgcgaccacgggcagagccacgcggcgggaggactacaactcccggcacaccccgcgccgccccgcctctactcccagaaggccgcggggggtggaccgcctaagagggcgtgcgctcccgacatgccccgcggcgcgccattaaccgccagatttgaatcgcgggacccgttggcagaggtggcggcggcggcatgggtgccccgacgttgccccctgcctggcagccctttctcaaggaccaccgcatctctacattcaagaactggcccttcttggagggctgcgcctgcaccccggagcgggtgagactgcccggcctcctggggtcccccacgcccgccttgccctgtccctagcgaggccactgtgactgggcctcgggggtacaagccgccctcccctccccgtcctgtccccagcgaggccactgtggctgggccccttgggtccaggccggcctcccctccctgctttgtccccatcgaggcctttgtggctgggcctcggggttccgggctgccacgtccactcacgagctgtgctgtcccttgcagatggccgaggctggcttcatccactgccccactgagaacgagccagacttggcccagtgtttcttctgcttcaaggagctggaaggctgggagccagatgacgaccccatgtaagtcttctctggccagcctcgatgggctttgttttgaactgagttgtcaaaagatttgagttgcaaagacacttagtatgggagggttgctttccaccctcattgcttcttaaacagctgttgtgaacggatacctctctatatgctggtgccttggtgatgcttacaacctaattaaatctcatttgaccaaaatgccttggggtggacgtaagatgcctgatgcctttcatgttcaacagaatacatcagcagaccctgttgttgtgaactcccaggaatgtccaagtgctttttttgagattttttaaaaaacagtttaattgaaatataacctacacagcacaaaaattaccctttgaaagtgtgcacttcacactttcggaggctgaggcgggcggatcacctgaggtcaggagttcaagacctgcctggccaacttggcgaaaccccgtctctactaaaaatacaaaaattagccgggcatggtagcgcacgcccgtaatcccagctactcgggaggctaaggcaggagaatcgcttgaacctgggaggcggaggttgcagtgagccgagattgtgccaatgcactccagcctcggcgacagagcgagactccgtcataaaaataaaaaattgaaaaaaaaaaaagaaagaaagcatatacttcagtgttgttctggatttttttcttcaagatgcctagttaatgacaatgaaattctgtactcggatggtatctgtctttccacactgtaatgccatattcttttctcacctttttttctgtcggattcagttgcttccacagctttaatttttttcccctggagaatcaccccagttgtttttctttttggccagaagagagtagctgttttttttcttagtatgtttgctatggtggttatactgcatccccgtaatcactgggaaaagatcagtggtattcttcttgaaaatgaataagtgttatgatattttcagattagagttacaactggctgtctttttggactttgtgtggccatgttttcattgtaatgcagttctggtaacggtgatagtcagttatacagggagactcccctagcagaaaatgagagtgtgagctagggggtcccttggggaacccggggcaataatgcccttctctgcccttaatccttacagtgggccgggcacggtggcttacgcctgtaataccagcactttgggaggccgaggcgggcggatcacgaggtcaggagatcgagaccatcttggctaatacggtgaaaccccgtctccactaaaaatacaaaaaattagccgggcgtggtggtgggcgcctgtagtcccagctactcgggaggctgaggcaggagaatggcgtgaacccaggaggcggagcttgcagtgagccgagattgcaccactgcactccagcctgggcgacagaatgagactccgtctcaaaaaaaaaaaaaaaagaaaaaaatctttacagtggattacataacaattccagtgaaatgaaattacttcaaacagttccttgagaatgttggagggatttgacatgtaattcctttggacatataccatgtaacacttttccaactaattgctaaggaagtccagataaaatagatacattagccacacagatgtggggggagatgtccacagggagagagaaggtgctaagaggtgccatatgggaatgtggcttgggcaaagcactgatgccatcaacttcagacttgacgtcttactcctgaggcagagcagggtgtgcctgtggagggcgtggggaggtggcccgtggggagtggactgccgctttaatcccttcagctgcctttccgctgttgttttgatttttctagagaggaacataaaaagcattcgtccggttgcgctttcctttctgtcaagaagcagtttgaagaattaacccttggtgaatttttgaaactggacagagaaagagccaagaacaaaattgtatgtattgggaataagaactgctcaaaccctgttcaatgtctttagcactaaactacctagtccctcaaagggactctgtgttttcctcaggaagcattttttttttttttctgagatagagtttcactcttgttgcccaggctggagtgcaatggtgcaatcttggctcactgcaacctctgcctctcgggttcaagtgattctcctgcctcagcctcccaagtaactgggattacagggaagtgccaccacacccagctaatttttgtatttttagtagagatggggtttcaccacattgcccaggctggtcttgaactcctgacctcgtgattcgcccaccttggcctcccaaagtgctgggattacaggcgtgaaccaccacgcctggcttttttttttttgttctgagacacagtttcactctgttacccaggctggagtagggtggcctgatctcggatcactgcaacctccgcctcctgggctcaagtgatttgcctgcttcagcctcccaagtagccgagattacaggcatgtgccaccacacccaggtaatttttgtatttttggtagagacgaggtttcaccatgttggccaggctggttttgaactcctgacctcaggtgatccacccgcctcagcctcccaaagtgctgagattataggtgtgagccaccacacctggcctcaggaagtatttttatttttaaatttatttatttatttgagatggagtcttgctctgtcgcccaggctagagtgcagcgacgggatctcggctcactgcaagctccgccccccaggttcaagccattctcctgcctcagcctcccgagtagctgggactacaggcgcccgccaccacacccggctaatttttttgtatttttagtagagacgggttttcaccgtgttagccaggagggtcttgatctcctgacctcgtgatctgcctgcctcggcctcccaaagtgctgggattacaggtgtgagccaccacacccggctatttttatttttttgagacagggactcactctgtcacctgggctgcagtgcagtggtacaccatagctcactgcagcctcgaactcctgagctcaagtgatcctcccacctcatcctcacaagtaattgggactacaggtgcaccccaccatgcccacctaatttatttatttatttatttatttattttcatagagatgagggttccctgtgttgtccaggctggtcttgaactcctgagctcacgggatccttttgcctgggcctcccaaagtgctgagattacaggcatgagccaccgtgcccagctaggaatcatttttaaagcccctaggatgtctgtgtgattttaaagctcctggagtgtggccggtataagtatataccggtataagtaaatcccacattttgtgtcagtatttactagaaacttagtcatttatctgaagttgaaatgtaactgggctttatttatttatttatttatttatttatttttaatttttttttttgagacgagtctcactttgtcacccaggctggagtgcagtggcacgatctcggctcactgcaacctctgcctcccggggtcaagcgattctcctgccttagcctcccgagtagctgggactacaggcacgcaccaccatgcctggctaatttttgtatttttagtagacggggtttcaccatgctggccaagctggtctcaaactcctgaccttgtgatctgcccgctttagcctcccagagtgctgggattacaggcatgagccaccatgcgtggtctttttaaaattttttgattttttttttttttgagacagagccttgctctgtcgcccaggctggagtgcagtggcacgatctcagctcactacaagctccgcctcccgggttcacgccattcttctgcctcagcctcctgagtagctgggactacaggtgcccaccaccacgcctggctaattttttttggtatttttattagagacaaggtttcatcatgttggccaggctggtctcaaactcctgacctcaagtgatctgcctgcctcggcctcccaaagcgctgagattacaggtgtgatctactgcgccaggcctgggcgtcatatattcttatttgctaagtctggcagccccacacagaataagtactgggggattccatatccttgtagcaaagccctgggtggagagtcaggagatgttgtagttctgtctctgccacttgcagactttgagtttaagccagtcgtgctcatgctttccttgctaaatagaggttagaccccctatcccatggtttctcaggttgcttttcagcttgaaaattgtattcctttgtagagatcagcgtaaaataattctgtccttatatgtggctttattttaatttgagacagagtgtcactcagtcgcccaggctggagtgtggtggtgcgatcttggctcactgcgacctccacctcccaggttcaagcgattctcgtgcctcaggctcccaagtagctgagattataggtgtgtgccaccaggcccagctaacttttgtatttttagtagagacagggttttgccatgttggctaagctggtctcgaactcctggcctcaagtgatctgcccgccttggcatcccaaagtgctgggattacaggtgtgaaccaccacacctggcctcaatatagtggcttttaagtgctaaggactgagattgtgttttgtcaggaagaggccagttgtgggtgaagcatgctgtgagagagcttgtcacctggttgaggttgtgggagctgcagcgtgggaactggaaagtgggctggggatcatctttttccaggtcaggggtcagccagcttttctgcagcgtgccatagaccatctcttagccctcgtgggtcagagtctctgttgcatattgtcttttgttgtttttcacaaccttttagaaacataaaaagcattcttagcccgtgggctggacaaaaaaaggccatgacgggctgtatggatttggcccagcaggcccttgcttgccaagccctgttttagacaaggagcagcttgtgtgcctggaaccatcatgggcacaggggaggagcagagtggatgtggaggtgtgagctggaaaccaggtcccagagcgctgagaaagacagagggtttttgcccttgcaagtagagcaactgaaatctgacaccatccagttccagaaagccctgaagtgctggtggacgctgcggggtgctccgctctagggttacagggatgaagatgcagtctggtagggggagtccactcacctgttggaagatgtgattaagaaaagtagactttcagggccgggcatggtggctcacgcctgtaatcccagcactttgggaggccgaggcgggtggatcacgaggtcaggagatcgagaccatcctggctaacatggtgaaaccccgtctttactaaaaatacaaaaaattagctgggcgtggtggcgggcgcctgtagtcccagctactcgggaggctgaggcaggagaatggcgtgaacctgggaggtggagcttgctgtgagccgagatcgcgccactgcactccagcctgggcgacagagcgagactccgtctcaaaaaaaaaaaaaaaagtaggctttcatgatgtgtgagctgaaggcgcagtaggcagaagtagaggcctcagtccctgcaggagacccctcggtctctatctcctgatagtcagacccagccacactggaaagaggggagacattacagcctgcgagaaaagtagggagatttaaaaactgcttggcttttattttgaactgttttttttgtttgtttgttttccccaattcagaatacagaatacttttatggatttgtttttattactttaattttgaaacaatataatcttttttttgttgtttttttgagacagggtcttactctgtcacccaggctgagtgcagtggtgtgatcttggctcacctcagcctcgaccccctgggctcaaatgattctcccacctcagcttcccaagtagctgggaccacaggtgcgtgtgttgcgctatacaaatcctgaagacaaggatgctgttgctggtgatgctggggattcccaagatcccagatttgatggcaggatgcccctgtctgctgccttgccagggtgccaggagggcgctgctgtggaagctgaggcccggccatccagggcgatgcattgggcgctgattcttgttcctgctgctgcctcggtgcttagcttttgaaacaatgaaataaattagaaccagtgtgaaaatcgatcagggaataaatttaatgtggaaataaactgaacaacttagttcttcataagagtttacttggtaaatacttgtgatgaggacaaaacgaagcactagaaggagaggcgagttgtagacctgggtggcaggagtgttttgtttgttttctttggcagggtcttgctctgttgctcaggctggagtacagtggcacaatcacagctcactatagcctcgacctcctggactcaagcaatcctcctgcctcagcctcccagtagctgggactacaggcgcatgccaccatgcctggctaattttaaatttttttttttctcttttttgagatggaatctcactctgtcgcccaggctggagtgcagtggcgtgatctcggctgacggcaagctccgcctcccaggttcactccattcgcctgcctcagcctcccaagtagctgggactacaggcgctgggattacaaacccaaacccaaagtgctgggattacaggcgtgagccactgcacccggcctgttttgtctttcaatagcaagagttgtgtttgcttcgcccctacctttagtggaaaaatgtataaaatggagatattgacctccacattggggtggttaaattatagcatgtatgcaaaggagcttcgctaatttaaggcttttttgaaagagaagaaactgaataatccatgtgtgtatatatattttaaaagccatggtcatctttccatatcagtaaagctgaggctccctgggactgcagagttgtccatcacagtccattataagtgcgctgctgggccaggtgcagtggcttgtgcctgaatcccagcactttgggaggccaaggcaggaggattcattgagcccaggagttttgaggcgagcctgggcaatgtggccagacctcatctcttcaaaaaatacacaaaaaattagccaggcatggtggcacgtgcctgtagtctcagctactcaggaggctgaggtgggaggatcactttgagccttgcaggtcaaagctgcagtaagccatgatcttgccactgcattccagcctggatgacagagcgagaccctgtctctaaaaaaaaaaaaaaccaaacggtgcactgttttcttttttcttatcaatttattatttttaaattaaattttcttttaataatttataaattataaatttatattaaaaaatgacaaatttttattacttatacatgaggtaaaacttaggatatataaagtacatattgaaaagtaattttttggctggcacagtggctcacacctgtaatcccagcactttgggaggccgtggcgggcagatcacatgagatcatgagttcgagaccaacctgaccaacatggagagaccccatctctactaaaaatacaaaattagccggggtggtggcgcatgcctgtaatcccagctactcgggaggctgaggcaggagaatctcttgaacccgggaggcagaggttgcggtgagccaagatcgtgcctttgcacaccagcctaggcaacaagagcgaaagtccgtctcaaaaaaaaagtaattttttttaagttaacctctgtcagcaaacaaatttaacccaataaaggtctttgttttttaatgtagtagaggagttagggtttataaaaaatatggtagggaagggggtccctggatttgctaatgtgattgtcatttgccccttaggagagagctctgttagcagaatgaaaaaattggaagccagattcagggagggactggaagcaaaagaatttctgttcgaggaagagcctgatgtttgccagggtctgtttaactggacatgaagaggaaggctctggactttcctccaggagtttcaggagaaaggtagggcagtggttaagagcagagctctgcctagactagctggggtgcctagactagctggggtgcccagactagctggggtgcctagactagctgggtactttgagtggctccttcagcctggacctcggtttcctcacctgtatagtagagatatgggagcacccagcgcaggatcactgtgaacataaatcagttaatggaggaagcaggtagagtggtgctgggtgcataccaagcactccgtcagtgtttcctgttattcgatgattaggaggcagcttaaactagagggagttgagctgaatcaggatgtttgtcccaggtagctgggaatctgcctagcccagtgcccagtttatttaggtgctctctcagtgttccctgattgttttttcctttgtcatcttatctacaggatgtgactgggaagctctggtttcagtgtcatgtgtctattctttatttccaggcaaaggaaaccaacaataagaagaaagaatttgaggaaactgcgaagaaagtgcgccgtgccatcgagcagctggctgccatggattgaggcctctggccggagctgcctggtcccagagtggctgcaccacttccagggtttattccctggtgccaccagccttcctgtgggccccttagcaatgtcttaggaaaggagatcaacattttcaaattagatgtttcaactgtgctcctgttttgtcttgaaagtggcaccagaggtgcttctgcctgtgcagcgggtgctgctggtaacagtggctgcttctctctctctctctcttttttgggggctcatttttgctgttttgattcccgggcttaccaggtgagaagtgagggaggaagaaggcagtgtcccttttgctagagctgacagctttgttcgcgtgggcagagccttccacagtgaatgtgtctggacctcatgttgttgaggctgtcacagtcctgagtgtggacttggcaggtgcctgttgaatctgagctgcaggttccttatctgtcacacctgtgcctcctcagaggacagtttttttgttgttgtgtttttttgttttttttttttggtagatgcatgacttgtgtgtgatgagagaatggagacagagtccctggctcctctactgtttaacaacatggctttcttattttgtttgaattgttaattcacagaatagcacaaactacaattaaaactaagcacaaagccattctaagtcattggggaaacggggtgaacttcaggtggatgaggagacagaatagagtgataggaagcgtctggcagatactccttttgccactgctgtgtgattagacaggcccagtgagccgcggggcacatgctggccgctcctccctcagaaaaaggcagtggcctaaatcctttttaaatgacttggctcgatgctgtgggggactggctgggctgctgcaggccgtgtgtctgtcagcccaaccttcacatctgtcacgttctccacacgggggagagacgcagtccgcccaggtccccgctttctttggaggcagcagctcccgcagggctgaagtctggcgtaagatgatggatttgattcgccctcctccctgtcatagagctgcagggtggattgttacagcttcgctggaaacctctggaggtcatctcggctgttcctgagaaataaaaagcctgtcatttcaaacactgctgtggaccctactgggtttttaaaatattgtcagtttttcatcgtcgtccctagcctgccaacagccatctgcccagacagccgcagtgaggatgagcgtcctggcagagacgcagttgtctctgggcgcttgccagagccacgaaccccagacctgtttgtatcatccgggctccttccgggcagaaacaactgaaaatgcacttcagacccacttatttatgccacatctgagtcggcctgagatagacttttccctctaaactgggagaatatcacagtggtttttgttagcagaaaatgcactccagcctctgtactcatctaagctgcttatttttgatatttgtgtcagtctgtaaatggatacttcactttaataactgttgcttagtaattggctttgtagagaagctggaaaaaaatggttttgtcttcaactcctttgcatgccaggcggtgatgtggatctcggcttctgtgagcctgtgctgtgggcagggctgagctggagccgcccctctcagcccgcctgccacggcctttccttaaaggccatccttaaaaccagaccctcatggctgccagcacctgaaagcttcctcgacatctgttaataaagccgtaggcccttgtctaagcgcaaccgcctagactttctttcagatacatgtccacatgtccatttttcaggttctctaagttggagtggagtctgggaagggttgtgaatgaggcttctgggctatgggtgaggttccaatggcaggttagagcccctcgggccaactgccatcctggaaagtagagacagcagtgcccgctgcccagaagagaccagcaagccaaactggagcccccattgcaggctgtcgccatgtggaaagagtaactcacaattgccaataaagtctcatgtggttttatctactttttttttctttttctttttttttgagacaaggccttgccctcccaggctggagtgcagtggaatgaccacagctcaccgcaacctcaaattcttgcgttcaagtgaacctcccactttagcctcccaagtagctgggactacaggcgcacgccatcacacccggctaattgaaaaatttttttttttgtttagatggaatctcactttgttgcccaggctggtctcaaactcctgggctcaagtgatcatcctgcttcagcgtccgacttgttggtattataggcgtgagccactgggcctgacctagctaccattttttaatgcagaaatgaagacttgtagaaatgaaataacttgtccaggatagtcgaataagtaacttttagagctgggatttgaacccaggcaatctggctccagagctgggccctcactgctgaaggacactgtcagcttgggagggtggctatggtcggctgtctgattctagggagtgagggctgtctttaaagcaccccattccattttcagacagctttgtcagaaaggctgtcatatggagctgacacctgcctccccaaggcttccatagatcctctctgtacattgtaaccttttattttgaaatgaaaattcacaggaagttgtaaggctagtacaggggatcc

SEQ ID NO: 4001 - DNA, 432 bp, Homo sapiens
  misc_feature (1)..(432): n=a,t,g or c
ggcccatatccagtatggcggttatagatgtaaaaatgctatcaggatttactccaaccatgtcatccattgaagagcttgaaaacaagggccaagtgatgaagactgaagtcaagaatgaccatgttcttttctacttggaaaatgttttgggtcgagcagacagtttcactttttctgctgagcagagcaaccttgtgttcaacattcagccagccccaggcatggtctacgattagtacgaaaaagaagaatatgccctagctttttaccacatcaacagnagcncaagtttccgagtgagacaaaagcaattactggnagaagtaaagaaattttattacgtcataaaccattgaaaacacatctngtaagaaaatgaaancctgantaagataggacaaatagntggngaaagaaaagtctcttggt

SEQ ID NO: 4002 - DNA, 559 bp, Homo sapiens
  misc_feature (1)..(559): n=a,t,g or c
ggnnggggnnngccatggaaagctggatatgaaatgtctaccttcttgacttacgggtcatgttgtggtccttcctatttccaccttaaaattgacaaggcctcgctcaaatttgtgctaccaatgatacagagtttatagcaaattttctaagggaagtatctgtggaaattttctcatgattcatgaaaaatgttattagaagtacaagtatcctggaatcagtcatcaggtcctccctctaagcccactgggaacaaactgaggtgtgtttatgaaagattccttactgttagttgtaagcaggctgtagaaagcccatcatccttagaagaagattcttctactaagcaatgttacatgatccaacctttaagacctctatctgtgagaggatcaaggatgcaccagtaaatgtgaactaatcataggtttctcataccagtcttctccaacttggncaggattgagggnaggnattcagatgnaggttcaaaccatgagtngattcagttgggnttaccaggtgatnanaaaaannnnnnnnnnnnnnnnnnnt

SEQ ID NO: 4003 - DNA, 3273 bp, Homo sapiens; identical to SEQ ID NO: 3595

SEQ ID NO: 4004 - DNA, 437 bp, Homo sapiens
ttttaaatatttaagagtttatttgagcagtgatccatgaattgggcagctccaagccagaagtggctagggagctccccagagagaacatgaggaggaggctttttaggacaaatagataaaagcaaagataatatttcattggttacagttatacagttacacagttatacagttgccttatttggtctatcccatgaggaagtcctagttactaattacgtttttgttggctgcttctgattggttgagcttaagttctgtgtttctttaacataggcatttacaagaaataccacaaataaagtttcagacatgcttgcaaatcaagcaaggttaaggtcacttagggggcccaactggctctgtctgctcaaggattcttctggcctcgtctccattttacatgaactggttgcataaataaacacagagta

SEQ ID NO: 4005 - DNA, 456 bp, Homo sapiens
  misc_feature (1)..(456): n=a,t,g or c
tttttttttttttttttaatagaacaggtcaagataaggctttatttctatagaaatgatgctttgacaatagtttggcttggtgtaaggctcacaaaagaaaatcacatgtaccatgtgtgggttaagcggtttgattcacactgaaccaggccagcccagttgccctctgctgtgtccacccgtggagtggagctgtgtcacagccatcacactggtaaactgctgtagctggtttaccaggctttctcttgccctgacagtacaggtgaagcctgtaaataaatcttctgctatctttgtgaacttaaccaaatcccagttaccttatttaaatggcaatagatctgttttcccttaaactagaaaccttaattacctgtattcctacctccagctcaacccatatatttgcanctttccagtaagcaggttttgtattttccatcgccccct

SEQ ID NO: 4006 - DNA, 447 bp, Homo sapiens
ttcatgtttccagaaatctcttttatttctttagatatataaaacactgttactttatattctctctgataattctagtatctgggtctagagtcaatctgttgcttctgctgggtctcatagtgtattgtttccttgtggtgtttatgaatttttaaacctggatctctcattttctttctttcttttttttttcttgtagagatggggtctctcactgcgttgcccaggctgctctggaactcctggcctcaagtgctgggattccaggcgtgaaccaccacgcccggctgagatgttccttttccttggaacttgattcaacacaaaatcctgaggcctggtgtgggtgtgttcctctggggcagattctcaactggggacacttctgcccccaaggacacattttcaacatcctgagacatttccgggtgtcatcacagtgtg

SEQ ID NO: 4007 - DNA, 261 bp, Homo sapiens; identical to SEQ ID NO: 860

SEQ ID NO: 4008 - DNA, 545 bp, Homo sapiens
  misc_feature (1)..(545): n=a,t,g or c
gaccatgatattctttttattgaaaagtaatataaaatggctttagacataaaagatagtattttacattatttcttctgttatatttttacgctttgtgccagaatttacttcttgcaactattcttgctttatctggaacagtttactccgttattgaatatctattagtgtttaatatagaagagcttaataaaccgctaatccgaaaataatggtattcccttgcttttcagacctttttgctgaatatgcttatttatgtccaatgtggaaatctgatcctgctctcttccactctgccagcagttccttttgtactgcttctggtagttcatagaaaacttgaggatcaatgtcagaagggaaagtaattttctcatcaacagaatctggctctctattttctgtaagtcctcatgagagtcgttgctactgtttgcttatgggcatcgtagtgtggtttctggagaaaagttgctcactctgcaagtttggaaatgaatgaaaagcagacncagcagggnttgaatttggtaaagtgg

SEQ ID NO: 4009 - DNA, 376 bp, Homo sapiens
tttttacatttactgatggaaaggtgaaatggtagatcgaagccagacattaaaactgttttaaattctcacttacttggacatagaatatcagcagtctcaaagtcattcacccggcagataggcaaaaatgagtcccttgaagatgaagtacaaaaagactattgaaaagtattttgcacattaaatgctaagctataggatataaacatcttattttcagaaagagatttctggatatatttcttaaggtcagtggacgaagccagaattctactataatgtataaccctatagcactgaaatctattttttcctgtatattaatcatgtagtcatgcaatactaaagtatagttacagattctaataaatag

SEQ ID NO: 4010 - DNA, 287 bp, Homo sapiens; identical to SEQ ID NO: 3600

SEQ ID NO: 4011 - DNA, 388 bp, Homo sapiens; identical to SEQ ID NO: 2117

SEQ ID NO: 4012 - DNA, 268 bp, Homo sapiens
gccccaaaatattttttattcttgcattacatttgtgtttccaattgtgaataaaaaatgcttagaaagtggttacaaaacagcgtgaactggacaggaggagcagctggccctgagggtccgtcacttctccacttagacggcgtgaagtgggcctggcgtctaggcggggtcagtcaggcttctcactctcaggatctggtgtgggcacggacagggtcggggcggctccgggaatgaccgtggtggacagagggccgggcgctgg

SEQ ID NO: 4013 - DNA, 330 bp, Homo sapiens; identical to SEQ ID NO: 3047

SEQ ID NO: 4014 - DNA, 374 bp, Homo sapiens
tttttaatatttaaaatgtttaatagttaaaattttttaacaatttaactttaaaaaggtcacacattttctgatccagcaatgccccaatcagattgtttcattttattattattatcaacactgtcccctttttggcacctgtaaaatagttcctttcgggagtttggagccaggccaggcaccgtcggctatggggatgagatgggcaggtttggagctcctctgtctagtgaggatcacggtctgcagagaagggttggcctccccgtctcctatcaaggcttaaagcaaggagaaccatcccaaatttggttccttttcccctaagtatccttagaggcaatccaccctgtgactaggtgactaggtga

SEQ ID NO: 4015 - DNA, 284 bp, Homo sapiens; identical to SEQ ID NO: 3605

SEQ ID NO: 4016 - DNA, 387 bp, Homo sapiens
tttttttttttttgtcaattattttattgagcagaaagttaatggttacacgtaccataacagtagattcttagaggattccaatttcctgtttagtatttaagtgacatcataaaattctcaatatatgatatttactgataatgacatttgaattgtcacttctccaccaataagtcttccaaaaagcacaagactattattattattccaattgtctgttttagtagtacactttatcttacttcttagcttctttgaactattttttctttacaattcatccacttaatattcttgcgatagaaataattttcaaaataaaagtgagacaaaaaggataaaaagtcatacactctaattcaaatttcaacatttataaaaatc

SEQ ID NO: 4017 - DNA, 303 bp, Homo sapiens; identical to SEQ ID NO: 3061

SEQ ID NO: 4018 - DNA, 523 bp, Homo sapiens; identical to SEQ ID NO: 2527

SEQ ID NO: 4019 - DNA, 379 bp, Homo sapiens; identical to SEQ ID NO: 2528

SEQ ID NO: 4020 - DNA, 477 bp, Homo sapiens
tttttttgatttgcaaaaacacagacattttaactttaataagttatacaagtaaggagtcaaattttacattacagaacaaagatgtattggttgttgtatcggtaagccagaattttgtgatttgagtccagcaccttgattcagtatagtggctacctgtcatacaggagggagtggaatcacaaactgcttcatctgctaagatgttgctattgagcaccatgtatatactcaaaacaaacagaaaaaccttaaaatacaaatgaaagccttatacatgaaattccatgggttttccaaaaggagtaaatcagagagctgggttccacaaatctaacacgagtctgcccactaaggagaagtgactcagggacactgttgcagattttctagtgcagcggaaggtctgagtctcatcatgcggttagaaactcagctagaagacatctgtctgcctcctctgggcgccaggag

SEQ ID NO: 4021 - DNA, 327 bp, Homo sapiens; identical to SEQ ID NO: 3609
  misc_feature (1)..(327): n=a,t,g or c

SEQ ID NO: 4022 - DNA, 327 bp, Homo sapiens
tttttttttgttttaaacactttatttataaaaaagtacatttttaatcctcagtacattttcaacccatcatttttttttaatacaagtaaaagggggtgatgcaaacaccccccaggtcagaaccaggaggatctgctgggctgtccctggaccaaaggcggaaagggcgacaagacgccgaagcaaggtagcgcatcacgctgggaggggagggtggcagcttctcctgggattcttttcatttatacaaaaaaggaaaaccaattttttcgaccaagaatcccattcctcacagcaggggtcagaagagcagcagcaccgagt

SEQ ID NO: 4023 - DNA, 443 bp, Homo sapiens; identical to SEQ ID NO: 2154
  misc_feature (1)..(443): n=a,t,g or c

SEQ ID NO: 4024 - DNA, 446 bp, Homo sapiens
  misc_feature (1)..(446): n=a,t,g or c
attctgccggtggagacagataaaaagcctcaggggaagcagctacagacccgagcggattacttgttgaagctgctcagaaagggtctggagaagaagggggctgtgacaggtggggaagaggccaaattaaagaagcggaancttcgggtaaagaaggaaaacaaagtgcccaggctgaaagaggagcatggaattgagctttcatctcctaggcattcagataatccatcagaagagggagaagtgaaagatgatggcttggaaaaaagtccaatganaaaaaaacagaagaaganagagaacaagggaaggaggggagggaagggagggnaagggagggaggggnaggaagggaggggnagggaagggaggggaagggaagggaggggaaggcttcttnccccntttctttnggcctccgaggggccnattttcccnctttt

SEQ ID NO: 4025 - DNA, 375 bp, Homo sapiens
  misc_feature (1)..(375): n=a,t,g or c
aaaagataatcttgcctccaccgtattacctttacttctttgtcaagattcataggccatatttttatgtggatctgcttctgggctgtctgctctgtcaactgatccatctgtctgtncttttgccaacctatcttgatgcctgtagctttatggnaagtctttaaggcaggcagcgtcatttctcctcctttgctcttgcccttcagtactgtgttggctactccagggnagtctccctttccatataaactttagaatcagtttttccgtatccaaaaaacaactcactggggatttttatgagggagtgcattggaatccatttatggaatttggggaaggaaccggcatcttggactatattaagggctt

SEQ ID NO: 4026 - DNA, 481 bp, Homo sapiens; identical to SEQ ID NO: 3089
  misc_feature (1)..(481): n=a,t,g or c

SEQ ID NO: 4027 - DNA, 404 bp, Homo sapiens
ttgcataacgaaagagtaacctagcatgtattatattttacagtgaaccatctaaaattaccttaatattcgtggcaggaacaggcccagacgaaggcaagccagagccttctttgacttgtgagccagaattgtgcaaataaggattagaaaagtattggtagaaacccagttttaagtttgtatgaagttagcaacattgtttcaaaataaatcaaacaaggccaagagcagtggcacatgcctgtaatcccagcactttgggaggccggggcgggtgtatcgcttgaggtcaggagtttgggatcagcctgggccaacatggtgaaaccccatctccaactaaaaaatgcgaggattggctgggcatggtggcatgcgcctgtggttccagctactcggga

SEQ ID NO: 4028 - DNA, 241 bp, Homo sapiens
  misc_feature (1)..(241): n=a,t,g or c
aatgtttaatctttccaattaaatacttccattccataaacttcagaaccaaagttagataccaacaagagactgaagataaatacagtgtcaatagtatcaagggactagcccatataatatacttgaaaatcgtattaatcaccaataaagtaccccaccataaacaaaatacacantaaaangtcaaggatacaattaaagacaggccaacatatgaggtggaccattgacaggagng

SEQ ID NO: 4029 - DNA, 270 bp, Homo sapiens
  misc_feature (1)..(270): n=a,t,g or c
tttttttttgtattgtatacacagtggaaagctggttttatttgggagacaatgggagcttttacattgttgagcaaaggagtgacgagatcagtcttgctttttagaaagattagtttggcagttacttatttgtaaccaganttagacagcaaatcgggatgcagggggagaagtcaggtgactattagtctgcgagtaattctgggacaagagcagtggtaatggaattnaaagggattaaagtntttaccaggttttggcataaat

SEQ ID NO: 4030 - DNA, 253 bp, Homo sapiens
  misc_feature (1)..(253): n=a,t,g or c
cgngcaaaagtgtttatttttctccttcagatatacantctattggggnttccgtgccactgaccaccatgtacaaggaagggnttcacaggcaagggggacaggtgagggcagcccccacttcactcaaggaacagggcaagggggcccagtacagagaacagaaatctcttacgacagcatcgtgccctggcagangattctgcatantcacctagaaatttcaattctaactgntttgatggaataatag

SEQ ID NO: 4031 - DNA, 299 bp, Homo sapiens; identical to SEQ ID NO: 3098
  misc_feature (1)..(299): n=a,t,g or c

SEQ ID NO: 4032 - DNA, 342 bp, Homo sapiens
ttaaaaaaattttttttattgaagaacagcatacataaagacacaccagttttaagtgcacaacccatttctcacaaagtagacacacttgagtttccaccaccaggtgaagagataaagccttattagcacctcaaaagatcctccccttgtgccccttttcccattacccaccctcctccccaaaggtaaccactatcctgacaccataggttagtttttgcctgtttttaaacttcacaaaaatggaatcatacagtctgcattctttaatgtctggctcctttcgctcaacatcatgtttgtgagattcatccaggttgcctgtagcagcagttcatt

SEQ ID NO: 4033 - DNA, 505 bp, Homo sapiens
  misc_feature (1)..(505): n=a,t,g or c
gtctcaaaaacaggtattatctttattaaaaaatggatagatatagcagcacttacaaaacaggttcatcaaaggcattgtacactgtcaactgataatgtggagagggcagccccctgcccagctggctatgggctctgcacaacgcttgcccgcaaccacctgctccacttggtacaacggagcccagaacacctgcgaggagagccacgccaccgtcgcnctccacagcttcaagcttttgttgttgtggggagtcccttagggtcaagtagcaccttccatagcagcatcgggagcacgcactgggtgtctgggaggtggctgggtgtactttgacccactttattttaaaaaaaacctattaggcatttcaattaaaaaacactttttgccctgttttggatggccattccacaggaaatactttctgtttgtngggaaggaaacactttttccctttcaggatatcttgttaaaaggcaaacggacggcttccgttcgt

SEQ ID NO: 4034 - DNA, 510 bp, Homo sapiens; identical to SEQ ID NO: 3622
  misc_feature (1)..(510): n=a,t,g or c

SEQ ID NO: 4035 - DNA, 575 bp, Homo sapiens
  misc_feature (1)..(575): n=a,t,g or c
aaataataataggctttctgccccaactaaaggaattttaggcttctgcaacaagtggaggaggcattttgaagatgggacacaaagaagtcttctttctccagatccagaagtcaggccttgtaagaattcaagccaaaaaaagttcatccatngggaaaaacggttcttctatcatccagcacgtatttgtgccaacagagctgagggacttgagtaattcaagaggctaggggttggggggcagatgtgtccagtggctcccacagccccgccgtcctgaaagtcacgccagttaatgtgcctcggggtnggatcagccctcccgacagatgactactaaggaaattaatccccagttaataatgtggctttggaccaagtaagtcaagattatttttcctacaattatacaaagatatgcttttccagaagggaacttctggaaaaagaaccaataacactatgcttaaaatattattcacatatttaggagaagaaagaacttnaaatagcagaagacctggaataccatgatncacggtggccaccctggggagcatgtctttgtgtga

SEQ ID NO: 4036 - DNA, 287 bp, Homo sapiens
tttcacaaatgtcaattttattgacactagtgcacaactaaatacaataattgcaaaggaagtggaacgtgtcaaacagaaatggtgacaatgagttagaactgcagttgtttcaaggtactacactattatttaaaaaaaaaactcacaaaaagaaaaatgttatcactacaagtaggaattagaagagagaaatcctggcagtctgtctagaggttaaaacatttcatgcatttgtgagttgctgttggagagtttgttttttatttgtccaccgtaatctggca

SEQ ID NO: 4037 - DNA, 416 bp, Homo sapiens
gtttctgagaatcagcactgctagtggagatgggcgccactactgctaccctcactttacctgcgccgtggacactgagaacatccgccgtgtcttcaacgactgccgtgacatcatccagcgcatgcatctccgccaatacgagctgctctaagaagggaacacccaaatttaattcagccttaagcacaattaattaagagtgaaacgtaattgtacaagcagttggtcacccaccatagggcatgatcaacaccgcaacctttcctttttcccccagtgattctgaaaaacccctcttcccttcagcttgcttagatgttccaaatttagtaagcttaaggcggcctacagaagaaaaagaaaaaaaaggccacaaaagttccctcctcactttcagtaaataaaataaaagc

SEQ ID NO: 4038 - DNA, 561 bp, Homo sapiens
  misc_feature (1)..(561): n=a,t,g or c
tattttttatcatttttatttttcaaccataccaatgtattacctattcacaattttaaccacacaaaatcaattttaaggaaaaccccgtaacagtgttaggagtgcttcttttcagtacctgatatgatactttcgcccggctaaatgactggcccagtaccctgacttccagaacctgtagccgtccatttctcttcggctgtcacagaaaggagtgtaaccataaggagcaccatccaaattgaaatctcttaactctttcagatctgttcgtacaatctgatcagcatccacaaacaggaacttgtcaacaactagtgggaaaagtacatccaggaagaggatcttgtaaccccagatgatacgctgtttttcagtttgttgangaagccaccggggccatttgtactggaacaagctcatactgggaaattgtanttcatttgccatgtaaggtataaactccttaaatgtgggggacaagtaattcttcaagaaccagaatttcacaggagtcctggnattcttcagcacggatagcatcatnatgcgagaang

SEQ ID NO: 4039 - DNA, 279 bp, Homo sapiens; identical to SEQ ID NO: 2582
  misc_feature (1)..(279): n=a,t,g or c

SEQ ID NO: 4040 - DNA, 423 bp, Homo sapiens
  misc_feature (1)..(423): n=a,t,g or c
ttttttttttttttttttcaagaatggaatatttgatttattctaaaatttgtgaatatttaaaaattttcaatataaaaagccagagncttgggcagggacaggcccaaagatgtctctgcctgagaactaagtgatggggcaaacccacttaatagtggccagagagcaaaggagagttataagaaaccgtaaaccaggctagggcagattcaccttcctaggggcaagacaaagaaggaagggggtagacagagcctactaagtaagctgcttatcccttctgccacatggttcagattcaatctaagaatgtgtatggtgacacctagtcagagacaggccctggcaggggacataaaaaacaaataaggcttcacccttcctctcaaagagcttacatgcaaagacgaaggaccancc

SEQ ID NO: 4041 - DNA, 459 bp, Homo sapiens; identical to SEQ ID NO: 2585
  misc_feature (1)..(459): n=a,t,g or c

SEQ ID NO: 4042 - DNA, 258 bp, Homo sapiens; identical to SEQ ID NO: 3638
  misc_feature (1)..(258): n=a,t,g or c

SEQ ID NO: 4043 - DNA, 339 bp, Homo sapiens
  misc_feature (1)..(339): n=a,t,g or c
tttcgttttattatttttttaatttttaaaggtgttcttttccccccttttccccctcccggccactccggtttgtgtttgccacaagactcataattcctttagaaagtggagtcgaattcataaaagtgatggggggagagcgcggagagggaaggctgggagcccagggagtcttcactacctacactgccgctcagctccaggcgcgagtggaggtcggtgtggggagacgcgactcctgcccgggatggctgacactctgcgagccccggcggccacgcgnggccggntcgaactagttggagggcgcggagggtcccggngggcgggtggcct

SEQ ID NO: 4044 - DNA, 407 bp, Homo sapiens
ggaaaataactttattcatgactgtgtttatcacactatcttatggagaagagatgatcaataaatatttgctgaataaatgaatagcagttacaaaacacttgattcatatggaattaatgttggttctcaaagtgaaaaattacaaacagcactgatattcagccagtatacaagtctggtcacagcagttgtataatactgaaataccccctgccactgacctttggcccccagatgcctcccactgccactgctctccccactgggaacccctgaagttcccacaggctcataactaaagggctaatgtcttgcacagcagcgagcacccaggaccgagcagccacatggccgggtctgctggtgaaagcatccattctgactgatcaggacctgaggggcct

SEQ ID NO: 4045 - DNA, 151 bp, Homo sapiens
ccaataaagctttatttacaaacacaggctgtgggctggatttggctgcaggtgtagtttgtgatccttgattcagacagtttagcaaggctgaaaagaacacccacacccccttgttacccacagatgggtgggactgtgttggccagag

SEQ ID NO: 4046 - DNA, 422 bp, Homo sapiens; identical to SEQ ID NO: 3641

SEQ ID NO: 4047 - DNA, 191 bp, Homo sapiens; identical to SEQ ID NO: 2593

SEQ ID NO: 4048 - DNA, 377 bp, Homo sapiens; identical to SEQ ID NO: 3645

SEQ ID NO: 4049 - DNA, 436 bp, Homo sapiens
acacaagaacttatgtttattgcaaacaaacaaacaaaaaaaaaaggaaagagaggaaaagagaaaatggtcagaagcacaacatataaggttaagaatttaaaagcatcttacattctgccctaatggcagcataattaatagcaacaaacggccgtcttgctgcctgccgcaccggaggtatttttgcagacctgacgagcaaattttgtgaaatatgtagtatgaaggaagaaagcttggcgggtcttcactgcagactttggactcccagtgtttcggactggcattccctgcatggcctggcgggacacgtgacttctaacacgagggtcctctgtagttgggctaggagataacttctcttcttctgactgggtgggcattttcaacctcccaaatttttcccataaagccaacaaattgcacatatcct

SEQ ID NO: 4050 - DNA, 406 bp, Homo sapiens
tactgtttcatacatttattttattttcatactatttttctgtatatgagaaagaaaaagactcaaaaataaaatgtacaacaagtggaacaagcagtgattggctgacaccccacggccaagggaggctccagcaggtttcggagtagaaaggtcatcacagtatggtgcataatggagcatcatattagagtggaattcagccaaacacagtaatgtatggatgtagacgcatctgaaagaaggaaaataaagatttatgcaggtaaaaaaaaatcgataaagaaattttccccagtgtcttatgcccaattggaaagctttagtagagatttcggagctaagaaaaattttaatgccaactttgtgtttgtaaataataaatacacttggggggtgggggaag

SEQ ID NO: 4051 - DNA, 293 bp, Homo sapiens
ataatacagaaccatttgtaatcaaaatcaatgtatacatgctactcgtttacaggtgtatattcagtcgctgaacaaatctccgttagggtcgctgttcgtgtgctgggaacacacaggtcaatgaagagcagccagaaagccccaagcttctggaaggttccactctcgtgaatcagcaccgcttgatcatcctgcccgtgaaggcatgtgctttcccttccagataagttacaaagccagagcacggaagccaggccctcatctttgaacattcagagactggtccgcag

SEQ ID NO: 4052 - DNA, 300 bp, Homo sapiens
ggcctactcctctcccttctcaaagaccttacaggcaaggctgaattctaaaatagccttattagttaaaaacaacactggtataactaactcccatttctacttgaaaaaattctttggaataatgcttttttagatcaaataaaaaaatcaagctttttataatgatgataaggaattaattacaatttttaaaattctaatatagtccatacaaggcttatatactttgctctaaacctagctcacctggtctagtagctacaacatttagtagctacagtcagaaaatctaaattc

SEQ ID NO: 4053 - DNA, 446 bp, Homo sapiens
attgaataaataaaaattttattggtttggtttttaaaacctataaacaatattcttagtttgatcacttaaaacatacaactttatgtaaccaaaatgcttaaaggattttgttcactgagtgttggctatttatacctatacatatgaaaatctgacctgtcaaaactggttttgcagtagccagatttgagatatatgtggatttctaaaaggttaacttgtcaaattatgagatctaatacaacacccaggtattaagggaaaaaatgattttgcaaccccaagttgggacttaacataagaaatccttatggtgttgccaacgttaaaaattctattgagcactttcatttttcagaataaaacaggataagcaaataactcacaacagtacctcatagtcttctataaatagctaagctatactttacagctataagaac

SEQ ID NO: 4054 - DNA, 285 bp, Homo sapiens
cagtcatccaagaagtctttattttcccacttggttactgttctggagcttgtaccctctgagctctgagatggggttggggggacagtgccagggagggcctgtggggctgtgcagttgcttccctctgggctggctctgacccagggcaggatcaggcacttgagagccccccaccgagcctcattggcatagacagtcgtgcctctcacagggctcaggggaggtggaggtgtgggcaagtccatccccaaggctgtaaggaaggagcagctcctccataag

SEQ ID NO: 4055 - DNA, 262 bp, Homo sapiens
ttttaaaacaaatattttaatgcatataaaaacaaaatgacagcacagtttagagtcttcagaagtgatgggttcctgggttgctaatccggaatacgtacactttcgtgcctttgtctccatcagcagttctgacttcaagcagcagaatagaagccatctgcaaaaggatcaagacgctctggggaaattatcatggtccgcctatgctttttgtattcatcttcccggtctgcaatctttggaggtctgtgctcagcaa

SEQ ID NO: 4056 - DNA, 402 bp, Homo sapiens; identical to SEQ ID NO: 3647

SEQ ID NO: 4057 - DNA, 297 bp, Homo sapiens; identical to SEQ ID NO: 2598

SEQ ID NO: 4058 - DNA, 233 bp, Homo sapiens
  misc_feature (1)..(233): n=a,t,g or c
gagtgtggggtcagtttattgggcatgcgtcagtcagaggctgggctggccagggtcgggtagggcagcagtttgtctggaccccgagaaacccaactggaatccagggcctcatctgnttcaaagccaaagtcttcctcaaccttaatctgcaccggggccagctctggagtcagcgcatttcctgctcggcgtccatcccgtggnactcgccgcctcttccgcccacttgg

SEQ ID NO: 4059 - DNA, 466 bp, Homo sapiens
tttgttagtaattgtctttatttgcatcatgtcttttattctcaaattgattatactttgcacttctagatgtccaaaatcaacaaaaacactaaaataatgatagctagatgcttagaaatgatccaacatgccatagctcctttgtaagcagatgacctgaaataccattgccctgtccctttgtgttgccaatcaacttggccttgagacttcactgcattcttaagccattttatctctcctctcttcctccaatgtgggatgagactaactaaaactaagtcttccagtgacatgggacaaacttacatctaaaatgttgatcatcaatactttcagaagaaaaaaaaaactcaaccaaaaggaagagaaagaaacgtagctcagaagagtctgaactatataaagtatgcaaaatttatcaggcccagagagacatgagtatgagatttttgtcacatcc

SEQ ID NO: 4060 - DNA, 403 bp, Homo sapiens; identical to SEQ ID NO: 3057

SEQ ID NO: 4061 - DNA, 431 bp, Homo sapiens
gcggccgctggtcaaccgcagcgtgcccaggtcgctctcgggcgtggtggtcttgatgaagtagtgcgtgtccttgccctcgatggtgaagtgcaggttctccaggtagaaggcgttgttgagcacggccgccaccttgatgcagtcctcgttggcgatgttgagcacgttggtctgcacgcggccctggctgacggccagcatgacgcccttgccgatcagcgacttgaccgtggcgaaccacagccaggactgcgcaccgcggcccggccgctcacctgcacctcggccatcttccccagcgacaggaaggccttggcttgccgcgccacttgctgctggactccgaagatgggcggtatatcatcccactgctgactcttcacaagttcgtaagaaggttctgttaaatcaaatttgggaacagggaa

SEQ ID NO: 4062 - DNA, 354 bp, Homo sapiens
tttttttttttttcaccttctaagcaacctttatttgcaaactctgaggttggacgcggtgcccgaggcggacagtgtcacgtttctctccctccactttcccctggcttttggggtgctccagcctctccccccagcccactcccgcccaaacccaaaatgcagaggagacttctctctctctctctcccgccaggcttcggggttccacggggcccatccctggcaggccaggcgtcgggtgctggtgctcgctcctctggggccagcctggggaggcagcatggcagcagtgcctgtcagggacccaggcgggggcaaggtcgctttctgagctgacaacttcaggttcca

SEQ ID NO: 4063 - DNA, 510 bp, Homo sapiens
tttgtagttgctgaaaagaagtttattgctattttcttattttattatacaaaactagatttgcttaaaacatttcccagtctctttaaaggaatgctagttagtgggaggccacagctagtaaattaccctcagtagtggtttcaagtagtccataactataaaaatcgttacggccaggatatgccggaacagaacactccccactggggtcctcagccttggatgtcagctcggcccctcaaggggtccctacacctggaagctgattccactcatcagtctcgagctgggcgcatgtggagttgatgtggagttgtagctgactggctggtggggtcagcctggcctcccagtgtggagcatgggcaccagcctcactgcgtggtcaccctagggcatatgctgcgggctgttgtggcattcctgtggccagcccagaggcaggcaggggctgtctggggtttgccatgtgcaccatcacctgggcttggggtgagctggaggagc

SEQ ID NO: 4064 - DNA, 354 bp, Homo sapiens; identical to SEQ ID NO: 396

SEQ ID NO: 4065 - DNA, 418 bp, Homo sapiens
gacagtttaactctttattctccttcacagcccagcagaccccaaggcgggcagagggtgcaggccgtccccaggatgctggtcatgggccagggtcatccttgcacctgcggcagtaggggcagcagccatgctgaagcaccagcaactcatagtcctcagaatggaacatctggaagcaggaggggcacatggtaatggaggcgtcaggcagcagtgagcggaagtattgccacctcaggggtgggggccatcgcttgatgaggacatcccggcggctcatggagcgcacacacagccggctcaccaccactggcacgaaactctgagccaccttgctcaaagctcagcttagctgtgaacgggtcctcatctccgatggagtccttggtctccactagccgcagaatctgggagc

SEQ ID NO: 4066 - DNA, 324 bp, Homo sapiens
tttttttggatggtcagtgcattttattgaatcagcacagtacaaaaataaataaaaataagggaccagggaattaaattacagccaaactgagcttcatgactttgtcagattataaaccacacatactcacaaacacactacacatacatacaaaatgagacaaatataaattaatattaacaatacccacagtttggtcaaagaatagctacagaagaaattgcactaaaaaaccaacatacatcacacgtgtgtaattagcagtttcaaatatacagctatgaataattctgagtgaaaaaaatggcacattttcttttc

SEQ ID NO: 4067 - DNA, 425 bp, Homo sapiens
ttttttttttttttttttttttttttttttttttttccactgaattcctttattcagtcaacaaacacttccagagccccctctgtactgaggcctcagcccagcccccaaggaaccctgaggtcaggggagacagctggacacagacacttccccagccccagggccagagtggggctggagggaaggacagggctacagtagtagtgggggtatatgagggaaggctgcaaggatgtggtagctggagttttgagagatggataagagttttccaaggaggcaaaagtggcagaaaagctttgcaggtgaggaggagcagcagaagcttaacctgcatgagaatccctctcaccagtcagaaagttgaccctgcacagccaaggggtaagctctgaccattttgcaggggacagaactgagac

SEQ ID NO: 4068 - DNA, 593 bp, Homo sapiens
tttttttttagtgtgactaaggctttatttagaaaggaccttaacagtttcacaaacataaataaagccttagtcacactaaattaaaaaaaaaaattccttagggatatcttagagtagtaaagtgacttcctcatataaatagtttgaaagggtacttaagtttttcacccaaattgtgatatacaaaaaggttattaccaagcaacctacatgtcaagaaagccccagttaggaaggagccacagcatttatcttgtttataatttctttggtactcccactgtttagagcacaggttgaacaccatgttcatctaagccttattagttaaaaaatgtgttatggcaaggcaaataaactagtttaaaaaacattaaatttcaccatttgtagaaattcaagttttataatagcttgctatagcagctatagataaattagtcaccttattacaaactaaacctttgtaaacaagtttaaatttaattttcaagaaccaaattgcactagtcaagagtgtaggaattttgagaatctcaacactagagtcaaagtactgtatcacttagtataccctttaaggtagcact

SEQ ID NO: 4069 - DNA, 267 bp, Homo sapiens
gaaagaataggtttaatttattagttgctctttagcaaaggctatatagaacattattggggtgaaaattaaattctagttacagattcatgaaacttgaagccaaattagttttatgagactatcaactcccctttcatcctcctacacagcaaggtacctcatagtctatataattctttgccgtttttaaatgatttaagcagacataatacataatgcagttgatattaaatatcttgaggaatgtcaatagaactactttca

SEQ ID NO: 4070 - DNA, 239 bp, Homo sapiens
gatccaagcccttgttcagatttggtgcctgataagacaggggtttctctttttgtgacctttattattattattttgttaactgttgtaaccagttagctgttgtgttttaagatagaaaggaacaagactaaaattgtaaatactttgtaaacatcagcatttgtacttgaatagtaggattttaaagggcattgatagcataccaaacaaaaggcaaaataaagtgacctttttat

SEQ ID NO: 4071 - DNA, 332 bp, Homo sapiens
  misc_feature (1)..(332): n=a,t,g or c
gatcctcctcagaaactaccggacttgttttctgtattggtgtgttttgtatcttgcttgaacttcctgttcttcttggtatactttaacattatnatnatgtgggattccaaaagtggaagaaatcagaagaaaatcagctagctgtattcctaaacaaattgtttcctaaacaaatgtgaaaatgtgaacagtgctgaaaggttttgtgaactttttgctatgtataantgaaattaccattttgagaaccatggaaccacaggaaaggaaatggtgaaaagtcattgttgtctacacaaaataaatgtatatggagaccaaagaccaaa

SEQ ID NO: 4072 - DNA, 305 bp, Homo sapiens
aaccatttgctcagtagaagtttaatggagaaatcgttgtttaaaacaatcagtcaaaaagaacagctcttttacaaacaagttatggcagtggcaagtcaaaaccccaggttcaatttcctattcctttcaccyscccctagaaggggcaagagsgcgggtgagcaggagagatggggctattgaaatggtagctagaggaattacaaaaatacactctgabgtagcaacagggttgtggtgaaacatgccagggggctggggrggmmcaatcagacgggaggttctggvggmaaacgragcct

SEQ ID NO: 4073 - DNA, 293 bp, Homo sapiens
ggacttcattttttttaatagatatagatatagatttatatttatatataaaatagttttttacaaaaaaatcaaccaaacaaaaaattaaaatcaacttaaaaaaacaacaaccaaacaacaataacaaaattcaaacaggagcagagatggggctgaggcataggggaggcccctagcgctgccctgaggaggagggggtgagaggctgaggcactcagtctcccttctgcttgggtgcttgcacagtcccattggccagagcagtggggttgcctggggatgaggcattt

SEQ ID NO: 4074 - DNA, 286 bp, Homo sapiens; identical to SEQ ID NO: 2620

SEQ ID NO: 4075 - DNA, 422 bp, Homo sapiens
  misc_feature (1)..(422): n=a,t,g or c
tttttttttggtttgaaacattttattggcaacactgatgtcatatttaggaaccatagacttttgtcagactgtgttagcttcagtgagaagtattagtggtcaatgatatttgaaatattgttaaagtacccagaaataataggcattaaaattcatttcgttcactgcaagaaacctctaaagatttcatgtcttcagtgggaactgggcatactgtaattgctatgtgggaacttaatataacctcaacagcaggcagagagaatacagtcctctcattatgcacatgctctagggatcatttattttaatgctttcaaataaatacgttccatgcagcacactacaataaataaggggncagcaatgttcttctaggtaaatccattcataatgtgaggtcaccatgtcaaaacacc

SEQ ID NO: 4076 - DNA, 415 bp, Homo sapiens; identical to SEQ ID NO: 3076
  misc_feature (1)..(415): n=a,t,g or c

SEQ ID NO: 4077 - DNA, 371 bp, Homo sapiens; identical to SEQ ID NO: 3660
  misc_feature (1)..(371): n=a,t,g or c

SEQ ID NO: 4078 - DNA, 357 bp, Homo sapiens
  misc_feature (1)..(357): n=a,t,g or c
ggtcacaatatgcatttattaatgaatgtatttatacacaatacaaacgtgcggggacaccgtccctttcacagcccagaacccagggtcagaagatgagggatccagcctcagaggggagatatgcgacttcccaagagcagttcttggcctgggaggggccatgagagtgcaagacacggggccgtggcggnggcggggctacgggagcggggcgtggccggcccctgaggttactataggggaatgggccccggcaggtccccttttctttggggcanttgggaagacagcggggcccacggccagnagctncttacacgtgggcgttttntgccctatttttncccaaagntg

SEQ ID NO: 4079 - DNA, 383 bp, Homo sapiens
  misc_feature (1)..(383): n=a,t,g or c
nntttaaaattattaaggataattttattatcaggatattatcaggataatgatagcagaacactaaacgaaacacaagctagggccatatgtgactgcaggggtcacatgcccacaaacagctttgaactcatccccttctgggcctttctcaatcctgcccaccttcaaaatcaagtgaaaggcttctgctgggtggatgaggaagtgtccatggctctgagcctctggtctggctctgccccaggatgggccaaagtggctccctcataggcactttgtaggacttccctggaggaatggccttttatctcctattagtttataagtttcctaaggagaaaggggctacaactntcattcatcctgggaatcaccacatg

SEQ ID NO: 4080 - DNA, 457 bp, Homo sapiens
  misc_feature (1)..(457): n=a,t,g or c
ccatcttttaaaaaatgctttatttctctgggcaggcttcatcggaatcacaattttcattcatttagtaactgttggccttgtatccacccctctctggcactcaggtctcacttaagagctggctgtctgagctgtgatttgcgatcagtgagatcggagacagaggcagccctagncagtcatgttttgttccacctgaccctgggcgccactccccctcccaggctacaggcaggcatgggcaccagccangggagagacagctcatccatactctggcccagcagaaactctgggcttagacaaaactgctcaattgaggacaaactgggcaaagtagaatctttctttgggagtttttagaaatatggtggggtggcatttgggaataataagaatagtagctgggcatggtggtacgcgcctgtagacccccagctctgggaggctgang

SEQ ID NO: 4081 - DNA, 445 bp, Homo sapiens; identical to SEQ ID NO: 3665

SEQ ID NO: 4082 - DNA, 496 bp, Homo sapiens
  misc_feature (1)..(496): n=a,t,g or c
gccagtcagaaaatgtttattgagctcctcaccctgctccccatcctgggcccatctgaggaatattgagcacccacacagagggaccaacaaagaaaaggaacctggtggggttccagaaggaggagacataaggtggacatggtattcatgagaaggaaggggcatcaggagcacacttgggtgaggatctacaggagtaacaccaagaaaatgctttagaagcagggtctcactatgttgcccaggttggtctcaaactcgtggcctcaagcgatctgccagcctctgcctcctgaactgctgggattacaagtatgagccaccacaaccagccccgtgtttcatgagctgttactccattccaggagcctatcacttgggccccctctggattcttgaccaaggtgtccacctccttcatgaaccggagacacagctcctcttcccatggcaaagcaatgcactncacagtcancagaantccgacngattc

SEQ ID NO: 4083 - DNA, 390 bp, Homo sapiens
  misc_feature (1)..(390): n=a,t,g or c
gttttggctattttggggccatttgcaatttattattaattttaggatcaatttgtcaatttcaacaaaaacattgtaaatttgaaagggattacattgcatccgtagaccaatttgtggagtactgccatcttaacaatattatactttccaatccatgaacgtggaatgtcttaccatttatttagatcatctttaattttttttttcaccaaagttttagttcttttgcttgtttcgagacagggtctcactctattgcccaggctggagtggaatggcaggaacacagctcactgcagccttagtctccctgggctcaagtgatccctccccaccacagcctcccaagtaactngggacccacaaggaagcttgncaacggggncc

SEQ ID NO: 4084 - DNA, 462 bp, Homo sapiens
  misc_feature (1)..(462): n=a,t,g or c
tacagaatgaaagaatgttgcatataattccattttaatacagaatttataaataaaatcatagtttatacttatagcatttcttcatttttagtgtttttttttcaagtgggttaaacagatctgtgagtaccttgagagttgtcatgtagaataagatcgctaagagggcagagtttgggattccctatgtaacttcagctacaacagccttgctttatccattgtattcattcagcaacaaataggtatttgtgggccaagtcttgctttagccgatgtaatatgtctatgtgatataaacatttttttgaaaaataaataaagaaaaagttcaattaacttaaaaaagagcttaagaaaagctttgaactggatgaaaggtctttcatcagcagaagagagagaataaaaggggcngggggggaggttcngaaaattttccaattagggatttccctt

SEQ ID NO: 4085 - DNA, 424 bp, Homo sapiens; identical to SEQ ID NO: 3090

SEQ ID NO: 4086 - DNA, 560 bp, Homo sapiens
  misc_feature (1)..(560): n=a,t,g or c
aaagttcatagagagtttattagccataagagctgtttatttccatactcatgaatcttaaactgcaattctctctctattcaacccaatcctggtagaatcatgtttttcttcctgaaggacttgtatgtactggaccagtaagaacctttgcctgttgtctgtagagaatagtcgatgatgtttcatgttcctgaagatgaaaatgttcatcatttttaggaattatagttaaatctggcaagtgcttcttgcttttttctttttcttgtacctaaacattttttgaatcataccaaattctcagtttctttgtttcaataagcaaaaatggaaacaaaataacttaaaataccactttgcaggntttgttaagtaatccttcataaattgcaagccttcngaggggagggcccttcccnaatttggtcccagcacctaacatagngtgggtggccccattgcaggagcnccattaatccttggccgaataaaattaataagccatggacnccgggaagaccncagagccnggacnaagtgggaagcngaccaaatat

SEQ ID NO: 4087 - DNA, 428 bp, Homo sapiens
  misc_feature (1)..(428): n=a,t,g or c
gcaagcaaaatattttattgaaaattcagaaaagttacaacactttaagacagcgtttttcatattctgttataaagaaaaatgttaaaagaattgacttgaatgttatatttaggtttcattcaaactaacaaaatcattttgaaaaacaaaaatccacccacagctgaatttattcagggtgtaaacatatattttcctatttgttatcaagaaaacgctaatgaaatatttttagtgttcttttcaaaacagcatctttctggacccaatttaaatagtaatttacgtattagtatctagttcacatagattactgatttgtgtgtgtgtctgcatatacttgtgcacgcatgcatgtaggaactagctaattttaatatgaaattttaagaatcnagagtgatttgcnatttcacttatcatag

SEQ ID NO: 4088 - DNA, 428 bp, Homo sapiens
tcactgtacatagaatttatttgtttgcctcatacattaaaaaatcggaatagtgcaattacctacaaataatttcaatcttctcattcgcgagttgcaaagtttaaagagaaactttaaattgctttgggtttacgtttttaaagacacactcagatttactaagagagcatatcagaaaccagatctaaaatgttaaggcataaactttaattatcaggtctacttcttctgcccctctaatgccagttctgcagatcgctcacaccactccaacctacagctaaagaatgaagtaaaacaggtacacactaaatttgggcatttaactgctgaaagaagtgttagaattttttagggtgaaaaagttatctgtatcaattatcttacacaattccactccttccttcaagaaaaggaatccaatg

SEQ ID NO: 4089 - DNA, 418 bp, Homo sapiens; identical to SEQ ID NO: 2635
  misc_feature (1)..(418): n=a,t,g or c

SEQ ID NO: 4090 - DNA, 371 bp, Homo sapiens; identical to SEQ ID NO: 2638

SEQ ID NO: 4091 - DNA, 382 bp, Homo sapiens
ttttttttttttctaataaactgtcttatttttattttcatgtttccttcttttcccagcattgcagttttcatgaactctgctttttaaaagttacttttagacaatgacagtaatctaggacccagaatggactggaccagctgatacagaatgcacgatgttgtggaatgcttaatatctgaaggcactgtatgtgtcttgccctgtgttctctgaaataatgtttgaaatttaatttgggatgatttgtttttgattctttcaggtatgggcacaaatgccgaaatgcactgcaatacacattgtttatgcctaaaaacaaccggaacataggaaatgatggtaaaaggtgggacactgtgctgctgtaatgcccggg

SEQ ID NO: 4092 - DNA, 476 bp, Homo sapiens
  misc_feature (1)..(476): n=a,t,g or c
aaanncanctttttattgaacacattataaaacaggtttagtaaaaagaccaaagcccatgtcatcatcagactccncagattcttctttctttgcttccattttcttctcctcagctgaagcagcagcaatggagggggcaggacctcctgctggtgcagcaccagctgctagagcagggtccaccagcccctacattgcagatgaggcttccaatgttgangttggccagggnctttccaaanaagccaggncaaaaggttcaacatttacantgggctgctttaatgagggtattgatattaacctccatgatgatcacctcgtcatcgtgcagantgagggccaagtaggacacagggcaagctcggagatgggagggccatggcgccggggcnagtttgggggcttgacatttgccagaggtggtngttantcactgggatggaagttgatgggncttaccccantgtttt

SEQ ID NO: 4093 - DNA, 433 bp, Homo sapiens
  misc_feature (1)..(433): n=a,t,g or c
aaaaaggttttaaatgtttaataactcctggagagataaaatgccaacgtttaggtatatttatgaattagaagcttccaaattgatatggagtaaagcagtgtcagatttttaaagtaagggttgaaacttggtttgccaaagctttcagggtgaaatcaagacaatcaagtactttaagtcaccacatccatacctaaaacatgctggcctgacccaagcttgaggtcctcagactgaacaggtgcaccgctgggatgctttcaagctccgggacggaaccgcctaggctgagtgctccggggagggaatgccgctgncccacatagacttggtgggtacttaatccaaaggnaattaaggcattttccagtccaggcgctttttaaaatggcacctttttgggcacngggggngatttttccccnaaaag

SEQ ID NO: 4094 - DNA, 328 bp, Homo sapiens; identical to SEQ ID NO: 485
  misc_feature (1)..(328): n=a,t,g or c

SEQ ID NO: 4095 - DNA, 178 bp, Homo sapiens
  misc_feature (1)..(178): n=a,t,g or c
tttttttcacaacatggttttggtttaacagcagcttaaaaaggaacaaaaaggaaacctctcatgcagacacatcaggtggcataaaacaataggcaattccacgcgganatcanttagccattctctctgtccgcacacaggactctggctgcacctcaggggcagagctgctttc

SEQ ID NO: 4096 - DNA, 463 bp, Homo sapiens
ttggctttcaatgcttcatcagcttttgcagcagcttcaagaaccagctgtagtctggctttggctgttcagctggtggcagatgttctaatccagctttgatgtttccagattccccacgtttgatgttatgtaattccttgtccttccctttatccttctccttttctcttttctctttatctctgcccttacgtcgttctctatcccgagaccgactacgcgttcttctgtgactggacctttcactgctacgactatgagaacggagacgaggtcttgacctggaccttcttgttctgctttttgacctagacctctgaactctataggatttccctccgacccctttgaacgacttcgacttcgtttccttctggagccataagaagagctactgcttgatcgatgcctgcgtcttctatcataagaatgtgaacgaggctgaagatctctggaccaa

SEQ ID NO: 4097 - DNA, 427 bp, Homo sapiens
acaaaaacaaataaggatttttatttgcagtactttccactcttcctttaaaaacttgccatttgcttatcagttcctctggggctgacccactcaaacaagacaaaggataaagaacaaaagatagtcctccgaggttacaggcttggaagggcagagaggagctacgaaccttggaagaaaaacaaggtgctcaggaattcatcgcctaacatttcacttccccacccaccccttagtgctcccactttggcagtgatctctctttggctttaaagagaaagggggaaatgtgccttgttttgcaggtgtgcaacaacacagctctggcatctcaagcagcaggggagaactctaagacagaagaatttcttcatgaaaatcacggtatgttatcacatactgtctccatggcccatacaaggac

SEQ ID NO: 4098 - DNA, 454 bp, Homo sapiens
  misc_feature (1)..(454): n=a,t,g or c
caatttttaaaaatgttttattacaaagcttcttttaaaaaaatgctcagcacattaactcaaactggaatgacaaacgttaggatgacagttttgggcaaaggctgtgcttgcttttttaaaaaatgggtacatcaatgctcattttaacaactnggcataaaatcccactaattggctaataaaaacagatacaaatacagaacatttaaagtaataacaattcaagtgctgggctttttacaacaagggggtgataaggaaagaaatgaaaattcactgcaaaccagtctgctgaacgcatctgttaaggtttactgtttaaaaaaaaaaaagaagaaaacagaagaaaaaataaactgaaattagggctgccaattgctaccaacagagtgggtttggctattacatttatttagctctactggaacaccttacaagggcggagaagcca

SEQ ID NO: 4099 - DNA, 396 bp, Homo sapiens
  misc_feature (1)..(396): n=a,t,g or c
ttgcataaattggttcagtcactatttattagttttaaaaaaatggtttttaaaagctgcaaaccatacacatttctgaatcaggaagaggtaaactgtgacatagttcccctgtgctgctgattcttttggggagaaaaaataagtttccaaattctatttttaaaaaaactagaggttntttttctatgattagccttcactcgaaagtccctttnacccaaggcatggtccctgggtcatctttttgacggcttagtttctgggaagttttcagtaaaccgctctcgtgctttgtcccagntttttttgttcttgttttggagaaggtgaacatcttcaaatcgaggatggtttncctgtccccaagcctgcatgtgttcgccgaagctgaag

SEQ ID NO: 4100 - DNA, 299 bp, Homo sapiens
  misc_feature (1)..(299): n=a,t,g or c
tgattggcttaaatgccaatgtagtttgtttctttgtctttgtacctggttctcttttctgtttcttttctaatctttgttttaggccttctagttccacaccatcttcttgagggcttccttcagtattttcattcttaattttctttttatttttcttttctgcctctgctttcatttctatggttantcgtggaangactcnttgaccacgcggagaaggnaaaacttcaggcannttgnggtgtttttcccccttggnccttcccccctttccccagggaagncgaacttgntca

SEQ ID NO: 4101 - DNA, 392 bp, Homo sapiens
  misc_feature (1)..(392): n=a,t,g or c
tttttttttgggtgcaaggaacattttattccataactgtctccaccgaagccgcagaagcaaagccaggagcagaatccattctgccagcgctgggctctggggagacatctgtgccctcaccatggaggacagaaggcaggggctcccgactccttggtcctgcctggggtgctcctgtccctctttcttgctgggggacctaccccaccctccccctcccacctcagccacagaggaacaagggagacaaactgagggctctgcagtccccgttcaaggccaacataatagtcgtgtggccccagcccagctaggcgcatcctctncggcatggcagcggtgaccaagcacagccaacgtcagctccgctccctgccgtctgagagctg

SEQ ID NO: 4102 - DNA, 417 bp, Homo sapiens
  misc_feature (1)..(417): n=a,t,g or c
ttcccaaagtgctgggattccaggcgtgacacccgcgcccggcccacagttttattctttacaggaggtcagtgcccatcatgttccctgtctacagacaaataaaaagctgctctctccagaggggcggcanagtcctgatggtccagtgagacccagaagcttccaggagaccttcagtcccgagtccctttcagtcatcatcttctgagtctgactcttctgtggactcagatgcgctctctggcaagtcgtctcccatctgctggaaccttcccgactgtgaatcccacatgtatttgatggtcaccttgaattcagccatctcatacccaaaaagcttcaggacgcgagcctgctctggggtcagcacatcgccctccttgcacacctcgtaagtcagacagcagaagtcac

SEQ ID NO: 4103 - DNA, 410 bp, Homo sapiens; identical to SEQ ID NO: 3675
  misc_feature (1)..(410): n=a,t,g or c

SEQ ID NO: 4104 - DNA, 279 bp, Homo sapiens
  misc_feature (1)..(279): n=a,t,g or c
ttaatanagtactgccttnaatttttaatgcatatatgttacagatttggttctccaagaaacactgaggtgcagtttagcagggggtctatgaaggcacacccttcgatcaanacctgagaaagggaacangantgagncagaggtntaagttgagttgcaatgcagatccaaagacagtgtccctaaaccccatagggagattgtggtgggcccagcagagttgcccaccactcacgtgctgaagtggccaggcctttctattctcacctccaacag

SEQ ID NO: 4105 - DNA, 356 bp, Homo sapiens
ggaatctcttttgtcatctctgtgccgcctatcatctttgtcttctttatgtttcttctcttctacctctcccctacttctctgttccttggacctttctcttgatcgctctctctctttttctcgttcatttcctctttccttatcatagtcacgatctcgtcttctacctctctcattttctttctctctttctcgatccctgtcccttctatcccctttcctatcacgacttcgactgcgacttctatgcctttccctacttctgctgcgcctgcgttctaacccccggtcaatacttcgggatcttcgccgttctttctccctttctttggcttcacgctctagtcgctggg

SEQ ID NO: 4106 - DNA, 407 bp, Homo sapiens
cacaaatgtcaaatgttaattttatccaaaaacacccccacagacacactcagcacacacagtgtcactacttactctcagattgctctccagactgggggaaccaattgacaaggcccccagctcccccagctatgagactacattccccataacttttcagcatgttcacttgattctccaaccttaacagacttgtgatattactttaatggcaaacaaggctctgctgtcccacgcgcttactttgccacatggcacagtatctgtgtcacagacgcactcttcacaaggacaggtccaggcctgtgtcagtcactgcttcatcccagcacctagcacagggcctgactcatggtgagctgtggacaaacgcacatgcaattaacgacttgttcctgcctcag

SEQ ID NO: 4107 - DNA, 409 bp, Homo sapiens; identical to SEQ ID NO: 3680

SEQ ID NO: 4108 - DNA, 384 bp, Homo sapiens; identical to SEQ ID NO: 1171

SEQ ID NO: 4109 - DNA, 250 bp, Homo sapiens
  misc_feature (1)..(250): n=a,t,g or c
gttatttagtttttatttcataatcataaacttaactctgcactgctaatctcctggggggagaaaggggcctatattgtacagacaatggctgggacccctgacattctggcactttctttcacatggntacaccatcctccctcctccttcacagggcagagggatcccaagtttcctctatcctctgctagtttttgatgttccctttatttagaaaaacaggcaactatctgcattgtcaaacaca

SEQ ID NO: 4110 - DNA, 415 bp, Homo sapiens
tttcgtgtgaataaacgattttcctttatgtggaatggttcagagaacgtgggcgtgtgcacacaagtgccctgttccggagactggtgggtgggggttctagcaggctcctctcctgcgcagggggtctggggctgcggcctcactgactgccttggctcctcctctgtgcgctggtcctctgctgctctttatggaaaatgtttcctgaagatcttccaatattttgaaggatttggtccagaatggatagattttcatactgagtgttctttgaattcttttctttactggaaacactcttctcactgccaggagacacctgtggcccacgataattctcagaaggatcgccatggagatttgcattagcattggcttcatcattggaaattttgacctcaatgccaggaga

SEQ ID NO: 4111 - DNA, 230 bp, Homo sapiens
cagggaaacagacaggatggaaaaagacaactgaatgccctcaactgaatgtcttcatcccctcttgcctgaaatttccaccttcccataggctggggagggagtcagttccagagcagaggagggtgacagggttgaggagggacttgtgagagctagaacttggcaaaatggcctagcccacccttcaaaggggaaaagagggaggaacaggggatgaaaagttgtcc

SEQ ID NO: 4112 - DNA, 384 bp, Homo sapiens
ttttttttttttttttacattaaaatgtaatttatttgcagaagaattgtctccagccctgtgcgcttgtgggattgggaaaacatcgtttttaaacacaaaggatcaagaagtactccttggagcagcattaataggcaccaatactacgaactagaatttagagccttgccactggccagcgctggggtcagtcgggagcatgccagcaaggctgaccctcagtttcactgaggccggagtcataagcagcactttaaagatccctgggtaatttggatgcattttgagatgtgagccgcatagatttaaggtactttagcattctgcagctttcacttattgattgtatgattcccaccgtctgaccccagcagtcttcac

SEQ ID NO: 4113 - DNA, 348 bp, Homo sapiens; identical to SEQ ID NO: 3690

SEQ ID NO: 4114 - DNA, 359 bp, Homo sapiens
ttttaaagatacaacactatttatttttttatttatgtcatgtcgggtgtgggatcttgagctctggcagtgatgatggtacttcctgttgtcagcccctcaagcccagctgcaaccagtctggggccattcagccagggacagagcccacagagcccatacacctgtctcccaccagcggggccctcctggcagggtagggaaggaggaccccgggcacccccctcagggcctgactcacgtactgtagtttgcactggacgcccgggccctccctgtcccaaagcccccttgtgagactcgtggctgctgggggccaataaagctgtgtaacttgatcgtgggtgtggctgggcgca

SEQ ID NO: 4115 - DNA, 494 bp, Homo sapiens
ttttaaagatttgtctacagttagacagggaagccaaggtcataactacagccagaactgtagaggctagacacctatgaggtataatgtattctattcaaactttgtgtgaaatggtatatttaactcacctgtcttgttggcatcacctctccttaaccctaacttcttgcaaaccctttaaagcatggacttgggaaatgtcagtgaccacctgccttctctgaccaggttaaaaaggctagccaatgcttgtgtaaaaaaaagaacaccacatattgttgtattatatgcaattggaaatgttcagttatcgcactttggtatccttttcagaaaaaaaaaaaaatctcaaaacttataaacataagcatggcattttacattgtaccaactgagtaacagtaaatagatgaggtgtgaccactataacttcttgaccaactttctatcttgaaactacacacatccaccctaccagctaccattctaat

SEQ ID NO: 4116 - DNA, 408 bp, Homo sapiens; identical to SEQ ID NO: 2373

SEQ ID NO: 4117 - DNA, 174 bp, Homo sapiens
ttttacatgcaatacttttattttagacatgcaaggaaagctatttcagaatctactaatttaaagcaagcagctgtatacagacagcaaaagaagcaacattttgttacagcttagcacaaggcatccaacacaaacaggcatgagacaatgcatatttatgtagcattaaaa

SEQ ID NO: 4118 - DNA, 320 bp, Homo sapiens
tttttttttttttcagaagaaaaaaatgtttaattaaattccaatgttcaaaactggatagtgtgtatggcaggtgatttgtacatacatgttactcttcatcaaaattgttttccatccctgtgacatcaatacaaactgcagctatttggttccaaaccatagcaagatacattctattttttaaaatgtaaatggtcatttaaaatagaaataattcttttagacgtactgcatttttacaaatgtgattttggaaatatattgctcgcaaagggtaattttaagagaattgttgagattctaatcccatctttatg

SEQ ID NO: 4119 - DNA, 458 bp, Homo sapiens
ggctttacaaagatcctgcattttattttgttattctttcaaaaagaactcaatacaaagtcaatataaaaaaatcaatactcaatttaaaacagaaacagtaatttctgaatgtctaacattctcctatgcaaagactgggagaaagaggaagggggagagagaaaataaattctttaatttaaacctttcttcaccctgctgggaatgcacatgccagagcaaatgaatccagcttaaccccttctggactggtcattgaagatagggttggaagaacagtattttagaatggtgatgaacagtgtcattattaactatatgtacatacacttatggcacttggaactgcactgtatccatgacgtagcaacctctgacacagcccgtctcacacttgccatctcttaccccatttcccaaaatatttcctgagaaagatattgtaaggaacttcc

SEQ ID NO: 4120 - DNA, 313 bp, Homo sapiens
tttttttttcaataaagggacaaaatgggtgtatgaacaggttaatgcagacaactgccaaaaaaacacagacagtggtttttccaatagaacttaacaaagaccagaaacaaatacaataaaaagccaggttgtaatgacctttggtcaactaaataaaaaaaaaaataaaaacaaagaaaaataaaagatcaaattaagtgcctctgttttgaacagggcacataagcaataataaatagtgactcccatagtaaaagataaaatttcaagttacgacaaacagctttcattacaggaatagaaaaggcca

SEQ ID NO: 4121 - DNA, 335 bp, Homo sapiens; identical to SEQ ID NO: 2983

SEQ ID NO: 4122 - DNA, 473 bp, Homo sapiens
tccaattcttgttgaaagtgctcaaattcctcctgacacttttctttttccttttccgaaatttctttatctggtgtgggcggctcttttccaggttcagtcaactggaaagtcagaaaagaaaggacatcatggtcatctgcaagacctccagttgcagcagatattccaaaatgcccttgtgcagggataatcatattttccactttggcacaaaattcataatcatttttatctggtgtaaagccattattgatcattactgtcagtgtgttctggtaataggtaatctttgctcggacaggatagggtttgttgcggaagtccctctggcaacttgccaaagcttgactagccccgtcattttgatggtcataatggatttgtccattgttgcctataattactatagcaggattatttttctttccatcattgtcaaaagaatcaaaaaatattccaacaccattcca

SEQ ID NO: 4123 - DNA, 460 bp, Homo sapiens
tttaaatttaaaaatactttattgctaaaaaatgctgattatcaatctgagccttcggtgagtcgtactctttttgctggtggagggtcttgcctcgaggttgatggttgctgactggtcagggtggtggctgctgaaggttggggtggctgtggcaatttcctaaaataagacatcggtgaagcttttcgcatgagttgactcttcctttcatgaaagatttctctgtagcatgcgatgctgtttgatagcattttgcccacagtagagcttctttcaaaattggagtcaatcctctcaaaccctgctgctgctttatcaactaagtttatgtaatattctaaatcctttgttgtcatttcaacaatgttcacagcatcttcaccaggtgtagattccatctcaagaaaccactttctttgcgcatccataagaaacaactcctcatctgttaaagttt

SEQ ID NO: 4124 - DNA, 251 bp, Homo sapiens; identical to SEQ ID NO: 3703

SEQ ID NO: 4125 - DNA, 354 bp, Homo sapiens
  misc_feature (1)..(354): n=a,t,g or c
aacctttacttttcattagaaagaacacagtaatgtaactggatgtgactttcagacatccctaaaagaaaagaaatgcttgcttggagatctgagcaagtaggtcctggnagaaataatataaaataaacaacttgccaactgttgggaagatttggtttgaatatttaaaattacctatcaacttagaattgggcttattaaatattccaatcccagaaatgaccatcagctaaacaagggtcaaagccagagtaatctctgagggcccacttcccagagagctgcccctttccttcaggcantaccgctgggcccgggggttagggcaatttgtncacgggcccttagggg

SEQ ID NO: 4126 - DNA, 321 bp, Homo sapiens
  misc_feature (1)..(321): n=a,t,g or c
tanncacttatagccaatatttaataatcccatattanctgatgtgtaaaacatgtctttatganctgttaccacccaaaagantgcatcataactttcaagantatgtcctttgacttctaacctctgcccttctttagaattacctttcctgcggccagtacatgctccttgttaatgactctacatttactcgcacaagggtttgtccgggactctnctgctaatcgatgaacaaacaggtaaacaggttcagatgggaccantaaggtcaccanttttttccaggacgaagttgagggcttctttcggnttgaagga

SEQ ID NO: 4127 - DNA, 419 bp, Homo sapiens; identical to SEQ ID NO: 1399
  misc_feature (1)..(419): n=a,t,g or c

SEQ ID NO: 4128 - DNA, 443 bp, Homo sapiens
gagacggagcctcgctctgtcacccaggctggagtgcagtggtgtgatctcggctcactgcaacctctgcctcccgggttcaagctattctcctgcctcagcctcttgagtagctgggattacaggcgtgtcccacccggctaatttttgtattttttgtagagacggggtttcaccatgttggctaggctggtctcgaactcctgacctcgtgaccgccttggcctctcaaagtctgggattacaggcgtgacacacgagcccagcccctccttaaaacagtttctaatcagatccgttattttacccaaatgggttgagggaacaaaaaccaaccctcatcaccctatttggtgaaaataaatataaaaaaagatgatcctctcttaaagggtcaccttccttcaggggtttgtaagactcagcactttaaaaagcttgaa

SEQ ID NO: 4129 - DNA, 508 bp, Homo sapiens
  misc_feature (1)..(508): n=a,t,g or c
actaagttataaaaaaaaaaaccccatcaccaaagacacctgtgcacaagtgtctgtcccttctgtcaccaacctagggcactacacccttcccaacatcatgaccctactgccaggtctacagattttgtaacactcaaagtgtcctgcattaaaaagcacgtgtctatttcctacgtgaaggggccaagggagccctggtggccaaatatcttcacccaggactgggagggcggcctcgatgacaaccaaggggtggatgctgacactccatcccaggacaggtggctgggtaggattccctgagcccctgacagctgggacatagggccaggacttgtacccgaggcagctgggcagtgggcagtcacattccagtaggccctgaggaatccccaaataagtcacgctgggaggaaagtgagacnccaaaacagaaacatgccctgccatccgggcgtggctcantctgtcttcgcgcagggctggttggcatggtgctacactc

SEQ ID NO: 4130 - DNA, 354 bp, Homo sapiens; identical to SEQ ID NO: 2712
  misc_feature (1)..(354): n=a,t,g or c

SEQ ID NO: 4131 - DNA, 341 bp, Homo sapiens; identical to SEQ ID NO: 3095
  misc_feature (1)..(341): n=a,t,g or c

SEQ ID NO: 4132 - DNA, 377 bp, Homo sapiens
  misc_feature (1)..(377): n=a,t,g or c
gtgaattgatttttaatagcaaaatggcattttacacagaagcagctacattcatggatgaaaacaaaaatccaagtgacgctcctttgttgaatccatgtaaaaatctgatttttaatctacagagaaatttctacccacacattcggtatcccctgggggnaatgacatggaaaacaaacatcttttctggtctgttaaagtaaaacaatggggncccnggggataggactctcaagaggggcctttgatgggaatgggaaccagtccccccaccccggaaaggcatccccccagctcaatatggtcacccntttacaccnggcacagcccctcacattgggggtccccnggcaccaaccctttttagggaaggg

SEQ ID NO: 4133 - DNA, 341 bp, Homo sapiens
tttttttttttttttttttttttttgttgtttcagaataatatgcaaaagggaagggaggaaacagcacaaagtatatcatatttttacacatcagacaccttcaggaagaaaggacatttctcatcttagtgtgacagactctggccaatatcccctttgaacatctgctttcgctggttggtaaaaaagtgtcattttaaatttagtgttactccttcaggctattccctctctcttcttacttgcagggccaaagcaacgtctctttccaccttggtcaccttccaacaacgatttcttcggacgcctttgttaatcattccgtccccactgaaccac

SEQ ID NO: 4134 - DNA, 575 bp, Homo sapiens
  misc_feature (1)..(575): n=a,t,g or c
tttttatggtcatttttaaatttgattacccatttaaatccagcagccaagtggtttcaacagactttctacttgaggtgaaaataataacactacaaacatatggcagagcttcgtacaagcatttcactcacagaggagtttatgttttcgaggatgtaggaaaagattttccaagtgtgaaaactaaatatatacaaaagcaatacattttgttattagttaaataaaatgtgtctttaaatatggaattctttgaaaaactcacttcatcgtccaaaattatggagactatttcacttttttaatcaaagatggaatattcatcacagttccccaagggattttctaactggcctgggcaaggagttcacttgtagagtgtagttagtgaaaacatccagtggccaagcctcatcaataactgtatccaaaaggagacgctgcttggggtgtacccagagaaaacaccaagctttcctggcttccgggcctccctcttcccattagtcttggggtgctccatagtgtgtgtgaagcncttgggttagaagacttgcacccatgattgagaa

SEQ ID NO: 4135 - DNA, 2474 bp, Homo sapiens
aagatattaatcacggagttccagggaaaaggaacttgtgaaatgggggagccggctggggttgccggcaccatggagtcaccttttagcccgggactctttcacaggctggatgaagattgggattctgctctctttgctgaacttggttatttcacagacactgatgagctgcaattggaagcagcaaatgagacgtatgaaaacaattttgataatcttgattttgatttggatttgttaccttgggagtcagacatttgggacatcaacaaccaaatctgtacagttaaagatattaaggcagaaccccagccactttctccagcctcctcaagttattcagtctcatctcctcggtcagtggactcttattcttcaactcagcatgttcctgaggagttggatttgtcttctagttctcagatgtctcccctttccttatatggtgaaaactctaatagtctctcttcaccggagccactgaaggaagataagcctgtcactggttctaggaacaagactgaaaatggactgactccaaagaaaaaaattcaggtgaattcaaaaccttcaattcagcccaagcctttattgcttccagcagcacccaagactcaaacaaactccagtgttccagcaaaaaccatcattattcagacagtaccaacgcttatgccattggcaaagcagcaaccaattatcagtttacaacctgcacccactaaaggccagacggttttgctgtctcagcctactgtggtacaacttcaagcacctggagttctgccctctgctcagccagtccttgctgttgctgggggagtcacacagctccctaatcacgtggtgaatgtggtaccagccccttcagcgaatagcccagtgaatggaaaactttccgtgactaaacctgtcctacaaagtaccatgagaaatgtcggttcagatattgctgtgctaaggagacagcaacgtatgataaaaaatcgagaatccgcttgtcagtctcgcaagaagaagaaagaatatatgctagggttagaggcgagattaaaggctgccctctcagaaaacgagcaactgaagaaagaaaatggaacactgaagcggcagctggatgaagttgtgtcagagaaccagaggcttaaagtccctagtccaaagcgaagagttgtctgtgtgatgatagtattggcatttataatactgaactatggacctatgagcatgttggaacaggattccaggagaatgaaccctagtgtgggacctgcaaatcaaaggaggcaccttctaggattttctgctaaagaggcacaggacacatcagatggtattatccagaaaaacagctacagatatgatcattctgtttcaaatgacaaagccctgatggtgctaactgaagaaccattgctttacattcccccacctccttgtcagcccctaattaatacaacagagtctctcaggttaaatcatgaacttcgaggatgggttcatagacatgaagtagaaaggaccaagtctagaagaatgacaaataatcaacagaaaacccgtattcttcagggtgttgtggaacagggctcaaattctcagctgatggctgttcaatacacagaaaccactagtagtatcagcaggaactcagggagtgagctacaagtgtattatgcttcacccagaagttatcaagacttttttgaagccatccgcagaaggggagacacattttatgttgtgtcatttcgaagggatcacctgctgttaccagctaccacccataacaagaccacaagaccaaaaatgtcaattgtgttaccagcaataaacataaatgagaatgtgatcaatgggcaggactacgaagtgatgatgcagattgactgtcaggtgatggacaccaggatcctccatatcaaaagttcgtcggttcctccttacctccgagatcagcagaggaatcaaaccaacaccttctttggctcccctcccgcagccacagaggcaacccacgttgtcagcaccatccctgagtcattacaatagcacccgcagctatgtggaaaactgagcgtgggacccccagactgaagagcaggtgagcaaaatgctgcttttccttggtggcaggcagagaactgttcgtactagaattcaaggagaaaagaagaagaaataaaagaagctgctccatttttcatcatctacccatctatttggaaagcactggaattcagatgcaagagaacaatgtttcttcagtggcaaatgtagccctgcatcctccagtgttacctggtgtagatttttttttctgtacctttctaaacctctcttccctctgtgatggttttgtgtttaaacagtcatcttcttttaaataatatccacctctcctttttgccatttcacttattgattcataaagtgaattttatttaaagctaaaaaaaaaaaaaaaaaaa

SEQ ID NO: 4136 - DNA, 617 bp, Homo sapiens
ggggaagaagttggtgtttcgctgggccctggtactgaagacgcggtccgggtcgcccctagctgtttcctactcacccaaagccccgcacccgccttttctctctctcctctggcaggatgaggcgtgcaggcctgggtgaaggagtacctcctggcaactatgggaactatggctatgctaatagtgggtatagtgcctgtgaagaagaaaatgagaggctcactgaaagtctgagaagcaaagtaactgctataaaatctctttccattgaaataggccatgaagttaaaacccagaataaattattagctgaaatggattcacaatttgattccacaactggatttctaggtaaaactatgggcaaactgaagattttatccagagggagccaaacaaagctgctgtgctatatgatgctgttttctttatttgtcttttttatcatttattggattattaaactgaggtgatgcatgtaattgtgaatttggaatttgttccaacttaatggcttgcagtgcagtaccactttgataaaaatcagcatcaaaacattcccagtgttcaaatacgtggcattttccattgaaaattgctgaattttagactta

SEQ ID NO: 4137 - DNA, 34641 bp, Homo sapiens
gtcgaccaggatggagtgcatcggcgcgatctcggctcactgcaaccaccgcctcccaggttcaaacgattctcatgcttcagcctcccgagtagctgggactggaggtgcgcggcaccatgcctggcttatgttctgtattttttgtagagacggggtttcgccatgatgcccaggccggtctcgaactcctggcctcaagcgatccgcccctcacggccttcagagctgctgtaatcacaggcgtgagccaccgcgttcgactcttccaaaaactttttggccagtttatctaagggcatatcctacagactgagtccagtgattgcacagaagtaaacgtcctctgcagctacatacctacaaacctatttctgtaacgtacattccccagcaaggtcccgcgggaaggatccactaccgcgagaggcctcccagccaggaaggggtggggctcaatctgcagtagattcccagaagcctcagtgagtttctgattctctaactgcgcatgcttctgcgcacgcgcaatagacattccaggacttccgggcacttcgtaaggtttaaaaaggatgcttcgcgttttctctctcctttttggagacagattcgcagtggtcgcttcttctccttggtaagtgtgatccttggtaagtgtgatcagatgcttgccaccggagttgtgggtctaatgctatagatcagtagccgagcttccctagaagatcatatagtattttatttatttactttttttttttttttgagacggagtcggtttgtcactcaggctggactgcagtgctcgttgcaacctccgcctgccgggttcaagcgattctcgtgcctcagcctctccagcagctgggattacaggcacgtgccaccacgcccggccaatttttgtattcttagtggagacggggtttcgctatgttggtcaggctggttttgaactcatgatttccggtgatccaccaccctcggccttccaaagtgctgggattacaggcgtgagccaccgcgcctggccggaaatcatgtaatttaaaactatatatgggtgtcttaggcggcatcggtcccaactctaaagtacgcgttagacgggcctgggccagaagtgggccatggagacctcgggacccgcaggctgccgcccgacccagcgagcctctgaaggtgcaccgccacccccactgtttatcttactgcctcatagtaggcacattgtcgttctcaatataattgcacacagttttattctggatcctcatttgcctttaagaattttctcaatttttctttttatttgatcgcaccactgcaacctccgcctgctgggctcaagcaattctcctgccgcagcctcccgagtagctgggactacaggcgtgtaccaccgcgcctggcttatttttgtatttttagtagagacgggatttcaccatgttggccaggctggtctccaacgcctgaccttgtggtccgccacgccaggccgaagattttcataatttggaagcattacgtttcgtaattatgctttctcgtatttttgtgatttgggtcatttttatttttatatttttaggattacaggcgtgagccatcgtgcctggccgatttgggggtaattaacaagtccacgtgtttcatttgaatttaggatagctgggcctaattgttgtctttgcttctgcggtaccttccacatagtactaaccgcctattgtaaagtaattagaatagctgaatatgcatgttaccagtctagaaaccgatttttttttaacaccccactgtggacagggtggaaactcgtttgctttcttgtttaagatctgtagtaacatgaatggatgaaattgtttcctattggattctgtaaatttatgcgttacactgattgtccaacgtggatacacccgggaggtcactctccccgggctctgtccaagtggcgtaggggagcatagggctctgccccatgatgtacaagtccctttccacaacgttggaaataaagctgggcctcgtgtctgcgcctgcatattcctacagcttcccagagtcctgtcgacaattactggggagacaaaccgatgcaggaaacagccttctagagcactgaatctggattgaagtcttttttttttttttttttttggagatggagtcgctctgtttcccaggctggagtgcagtggtgcactccattgcctctgcctcccgggttcaagtgattatgctaagtgattctcctgccttggcctcctgagtagctgggattacaggcccccgccaccacgccaggctaatttttgtatttttagtaaagacagggtttcaccatgttggtcaggctggtctcaaactcctgaccttgtgatccgccagcctctggcctcccaaaatgttgggattacaggcgtgagcaccacacctggctggattgaagtcttaatacatgtttaagaaaaattggctaaaaagtagccaggcatgatgataggtagctggaggaaggagaatcgctggagcccaggagtgacctatactcaaacctatactccagtgccactgtactccaaccccaggcgatagcatgaggcccctcgttgaaaaagtttagggttttgctgtactaatagattaatatcttgttttgcaggatttgttaaggattccaagtaactcttatttggtgagtaaatctgctaattgttttttgcttatcagctctttgtcaatgatttctgtaatggaaataggattgaagagacttttattctagttggtcaggatttacctctgaggcatttaatcattctcagagcaatagccaaatatcgactttgctgcatttttgtaggcatgttgacataacttcaacatatgctctgttctgtaaaaattgctttttttagtcagctcattaaaagtgcaaagtagtaaaagctgccctagtgaactgtaggaagcctaattggctttatctacatgtgtagcctgagctgagaaagatactagcccttgaaaatactgtgggtgattagcaatattggatttgtcggttactccaattcctcactaatgagcattccaacgtggataccctgggaggtcactctccccaggctctgtccaagtggcataggggagcttagggctctgcccatgatgtacagtccctttccacaacgttgaagatgaagctgggcctcgtgtctgcgcctgcatattcctacagcttcccagagtcctgtggataatgataggggagacaaaccatgcaggaaacatatctagtatactagattttaagttgaagtaggatcttcaggagtctaatcattatttcttttcttttaggagagaagacgatctgcacttcgcattttggcattgacatttaattttagggtcctttatatagaagggagagtaggtaaactgatttttttttttaacagggagggtttgacaatctttggcagacttggagcaaaagattgaggtgcatttcatgcctccttttgagagtcttgctctgtcgcccaggctgtagtgcagtggcgcaatcttggctgcaacctcagcctcccaagtagctgggattacaaacataagccaccacgcccagccctcatacctcttttaaaagtcgacctgttttgcagaaagtctgctgtttttgtactaaaggctttggaatttggcatttagctaggaatgcacattctttcacctcattcatactttaagaaccacagaagtgactctgcttggccagaaggcacactgtgttggtggttatattaaaagtccttgagtattttgcttttcatgatcttgctcactgcaacttccgcctcccaggttcaggcgattctcctgcctcagcctcccaagtagctgcgactacaggcgtgtagcaccacacctggctaatttttgtatttttagtagagatgaggtttcaccatattggccaggctgttctcaactcctgacctcgtgatccgcccacctcagcctcctaaagtgctgggattacagctgtgagccaccctgcccggccacttttgtatgatttctaatgtatttgtaatttacctaacaaattgcctaatctgctatgttaatgtatttatgaattaaaataaatacgactgcatgtttgtggttcatttttgtggaggtggctgtggtgacatcagccaagaatctgaatggtactgttgaaggaaactagcatgatagcttcagttctaaaggccctgaaacctagtctcaggtgggtcccccttgggttcactttatattggcagtttattgggaaaatggatattaggtcctgaccaataggaccgtaagtctgggttgagtgcaagatgagttagaccgattctttagcttcctgcagtgtagtggaggaaaaatcgatggtagcaacgggaggttgtatccctagctgatgagttgtatgagcctctactacctggcgcacctccgcctgaagattgccagaattgcttgcctcatgacgtgagtcacaatggaaactttgtcaagccccctgcactggctgccaacataaatgttcagtaccctgaaggatgggactgaagggggatcatctagaaggtaaagttacctactggcataggggaggtgggacagccgttaagccatttggaacttgatggagacaggtttgagggaggtgggtgagattggagtttggtggactgtagagcttgcttgccaaggtgttgaggtcagggttggtttgagaatggaagctagttactagctatgattgtgggggaacacagcttgatttttcttacaagctaagaggagtgaggcagtgtttaagagggcatgttaaatgcagccaggcttggtggctcacacccgtaatcccagcacttaggctaaggcaggcggatcacaacatctagagatcctggccaacgcggtgaaaccctgtctgtactaaaaatacaaaataactgggcatggtggtgtgcacctgtgggaggctgaggcagaattgctggaacccgggagatggaggttgtactgagctgagaccttgccactgcgctccagcctggtgacagagttaagtctcaaaaaaaaggcatcttcctaaagcaattgtatttgtgcttacctgtgccaggcactgttctaggtaagcactaagtgggctttaatacagcatattccaatggggaatcccaggaaccaaaagactaattgtccaagtccacaactagaagtggcacctctgcagaaacaagcatcaaattccctgctcaggaagaagccagatgagtcagccccattcgtctgtatgcccagtcccatccgtgtcctgctgtaactacatagatctcacctgagtaaagtgatttttttctgaaccagtggttttagtatgttttcaatccatattctcaggtgggtttgggtaactgcagtgctgggcaggaaatgaatgaatttctattgacttgcaaggtagaggtgaagcaaagctgtcagtaggtgttcaggtcccactctgctaaacttcagcttgcaatacccctttcttagactttccaaacaggcacttctggccttgttctttgtgtaggcagacagtattggttgcctatcttaggagtactagactgggtttgaatcctgatcccaccacttgctgttcatgagactttgggtgagttactcagcccctctgcctcaatttcatgttcacaaaataagtgataaactacctcatagagttgtaataaggacaaaggagttggtatttgtgaaaagattcttagggtctctagatggagtgcagcagcatgatcacttattaaataacattcttttgtgacttctcaggaaccaaggatacagtatccaattttttgttttttgtttttttttttttttgagagggagtctcgctctgtcgcccaggctggagtgcagtggcacaatctcagctcactgcaagctcagcctccccagcagctgggactacaggtgcacgccgccacacccggctaatttttttgtatttttagtagagaaggggtttcaccatgttagccaggaaggtctccatctcctgacctcgtgatccgcccacctcggcctcccaaagtgctgggtttacaggcgtcagccaccatgcccagcttttttttttttgagatcgaatctcactctgtctccaggagggagtgcaatggagccatcttggcttgctgcaacctccacctcccgggttccagcaattctcccacctcagcctcccaagtagctgggattacaggcgcacgccaccatgcccggctaattttttttgcattttttagtagagacgggtttcaccatgttagccaggctggtctcgaactcctgacctcaagtgatccacctgcctcagcatcccaaagtgttgggattacaggcgtaagccactgcgcctagcctcaagcctgatcctttttttttttttttttttgagatggagtctttgcctcccaggctggagtgcagtggcgtgatctcagctcactgctacctctgcttcctgggttcaagcgattctcctgcctcaacctcccaagtagctgggattacaagcgcctgcaccgcacccggctaatttttgtgttttttttttcagtagagacagggtttcgccatgttggccaggctggtctcaaaactcctgacctcaggtgatccacccgccttggcctcccgaagtgctgggattacaggcatgagccaccacgcccggcagagccttgatctcttaaccactatcctcacctcccctttccctaaggatccacaatggcctcactggctcttgaaggcaggctggcaccttgatcattcttcctggtcattagtattctgatctggttattttccattttatgtccatctaacctacttggaggatcctcaagagactgcatatgtaaactcagtacttattcttgtactgtgcctgccatatagcaagcactggctgatttaatttttctgtgttcttttttattgatttgtttttatctttattattttctttgcttattttggggttagtttgctcatctattcctagtttcttaagctagtagctgagctcattgattggagacctttctttttttctaatgtaggcatttagtgctataaatttcctccagatactgttaacaacacacaaattctggtatgttttgttttcattttaattcatttcaaaatatttttgagttccttttctattctttgatctatgggctacttgaaagtgaattattgttgttgtattagtgttgttcaaatctatccttgctagtttctttttttttggagactgcgttccaaaggctggagtgcagtggcacaatcttggctcactgcacagtccgcctcctgggttcacaccattctcctgcctcagcctccccagcagctgggactacaggtgcctgccaccatgccctgctaattttttgtagagatggggaaatgccatggtctcaatctcctgaccttgtgatccacccgcctcggcctcccaaagtgctgggattacaggtgtgagccaccgcgcccagcctcttttttttttttagacaagagtctcactctgttgccaaagccagagtgcagtggccaaatctcagctcactgcaacttctgcctccggagtagctggaattacagtcacgcaccaccacgcccagctaatttttttgtatttttagtagagatggggtttgcgcggctgaagtgcagtgatgcgatctcagctcactgcaacctctgcctcccaggttcaagcaattttcatgcctcagcctctggagcagctggtactacagcatgcaccaccatgcctggctaatttttttgtattttagtagagatggggtttcaccatgttgcccaggctggtctcaaactcctgagctcaggcagtgccgcctccctgacctcccaaagtgctagaattacaggactgagccaccgtgccctggcccttattttaaaaattttatttctgtaggtaacatgttgggtttttcagtatgacagtctatgtcttttaattggagtgtttaggctatttactttttttttttaagacagggtctcactctgtcacccaggccagagttcagtggcaagattatgactcactgcagccttaaactggaactcctggctcaagccatcctcccagctcggtctcctgagtagtgaagaccacaggcatgtgccactatggctggctaaattttgtattttttgtagagacaaggtctcatgatgttgtcccagctggtcttgacctccagggctcaagcaatcctcccaccttggcctcccaaagtgctaggaatacaggcatgagtcaccatgcccagccatattatacatttttaacttacaatagtccacattcaattgatattaaaccagttcacttgtagtataagaatcttccccagcctggccaatatggtgaaaccctgcctctactaaaaatacaaaaaaaaaaaaattagccaggtgtggtggtgctcgcctgtagtctcagctacttgggaggctgaaacagaagattgcttgaacctggaagcagaggttgcagtgagctgagatcgtgccacgcctaggcaacacgagcaagactccgtctcaaaaaaaaaaaaggcggggcccggtggctcacgcctgttatcccagcattttgggaggccgaggcgggcggatcacgagatcaggagatcaagaccgtcttggctaacacggtgaaaccccatctctactaaaaatacaaaaaattagccgggcgtggtggcgggtgcctgtagtcccagctactagggaggctgaggcaggagaatggcatgaacccaggaggtggagcttgcagtgagccaagatcgcgccactgcactccagcctgggcgacagagcgagactccgtctcaaaaaaaaaacaaaaaaaaaaccttctggcggcctggtgtggtggctcacacttgtaatcccagcactttgggaggctgagactggcggatcacctgaggtcgggagtacaagaccagcctgaccaacatggagaaaccccgtctctactaaaaatacaaaattagccgggcatggtggcacatgcctataatcccagcaactcgggatgctgaggcaggagaattgcttgaacctgggaggcagaggttgcagtgagccgagatcatgccattgcactccagcctgggcaacaagagcaaaactccatctcaaaaaaaaaaaacaatcttccggctgggcacagtggctcacgcctgtaatccatcccagcactttgggaagccaaggcaggcagatcacgaggtcagagcgagactccgtctcgaaaaaataaataaatatttcttccatttctcactatatagtctttgatattgtcatgtgtcttacttttatatatgttataaaacccacagtacattattacagccagaacctccatatcagccagttgcgatggctcactcctgtaattccaacactttgggatgccaaggcaggctgactgctgaggctcagaagttcaagaccagcctggccaacatagtgaaaccctgtctctaccaaaaatacaaaaattagatgggcaattagctggacgtggtggtgcacgcctgtaatcccagctactcgggaggctgaaacaggagaattgcttgaacccaggaggcagagattgcagtgaactgagatcacgccattacactccagcctaggcaacagagtgagactccgtctcaaaaaaaaaaattagctgggcatggtggtgcacatctgtggtcccagctactcgggaggctgaggcagaagttgcagtgagccgagatcctgccactgcactccagcctggatgacagagtgagactcttgagacaaacaactggggctgggcgcagtagttcacacgtgtaatcccagcactttgggaggccgagatgggtggatcacttgaggtcaagagctcaagaccggcctggccaacatggtgaaaccctgtctctattaaaaatacaaaaatgagccgggcatggtggtgcgtgtctgtaatcccagctactctggagactgaggcaggaaaattgcttgaacccaggggcagaggttgcagtgagccgagattgcaccactgcactccagcctgggcaacagaatgagactccatctcaaaataaaataaaaaaatacaaatacaaaactaaaaaaataaaaataaagggccaggtgcagttgctcatgcctgtaatcccagcactttgggaggccaagatgggcaggtcacctaggtcgggagttccagaccagcctggcaaaaatggtgaaacccggtctctactaaaaatacacaaaatggccaggcgcggtggctcacgcctgtaatcccagcactttggtaggctgaggcgggtggatcacctgacgtttaggaattcaagaccagcctggccaaggatggtgaaaccctgtctctactaaaaatacaaaaattagctgggcatggtggcaggcgctgtaatcccaggctactcaggaggctgaagcaggagaattgcttgaaccctggctgcagtgagccgagatcgcaccactgcactccagcctgggcaacagagtgagaccccatctcaaaaaaaaaaaaaaaagagttgaggtctccttccaccacttgtgtgaagaccccagaaaacttgctttacctctttaaacttcagttttcttatcttccaactgccatgaggtttttgtgaggaacaaatgagctgacatggatgtttctgtagttaacaaaataaagggtcttacaaaataggcaataataataataatcacttattattattacatgaagctacatgaatgtgtaagatcttggaggaagacagcagagagagagagagagatcagagatcccagggttaaaagttggagaaatttcacagtacatcatccaaaagaggagtccatgatggaggcagaggtaaacttggagaggtaagaaaccctgaagacaggggagtgctttgtggcaggctctgcatataagaattcagcctggccaacatggcgaaacccagtctctactaaaaatacgaaaattagccaggctttgtggcaggcacctgtaatcccagctatttgggaggctgaggcaggagaatcgcttgaacctgggaggcagaggttgcagtgagccgagatctcaccattgcactccagcccgggtgacaagagcaagactcgatctcaaaaaaaaaaaaagttcagttcagttggtaagactcatcaaaagtgtccatctagactttgggtgccgtagaatgactcagagtctgaatcaacatgaaatcgagaaaacgtcctttgcaagggtttcagggaacacctgaaatcctgaagaactgtttgtatccatcctgaagaatgggtgttaataagagacagccttttcttggtacctgttttccatctctaacccaaccccaactcacacccttctattttatctggtctctctcattcctcttgctcctccccacttggctcccgttttccccaagtccattctctattttgttctataagatctgatcatattaggatgctcttgtagctcataagaagatgactgggtgttcacacgcatatgagatgtgcctccctcaaaccttgttaagacatgggcacatacccatctgatgttaactcacggggaaaaaaatctgatcatgccattcccgtgcccaaattcccatatatccctactgcctcaggatagaggctggaccccttagacacacaagaccctgtatccatgatctgtcactcccacaggcaccctctactcccatctacttggcagtttcccacaacctccctgggttctcgtggttccctgtcattgcaaacgtcgcttctcctaggatgtcctgcccccctagacttaacttggaaagctgttcttaagccccggactgagtcagatgccctctgggtatccctgtcatagcgttgtgtggttgttgatagtctgatttttcaaccttctccatgccctcttgagggtagggaagatgagtatcttttttctccgtacagaccctaccgcacaagattttcctaaacagaccgaactcaaggagtctttctggttgttagtccacgtgtcccgatttggggtttccaaaatacacgcccactggaaccgggccaggggagccagcctggccaagggctcccccagcccggccaagggctcccccagcccgggagcgcgccacatgcagatcctgggatggccgccaggggccgccgggctctttgttttcctttctcacccgggtcggggccagaggcctgcagagcgcatgctctggggcagttcgcggcccggcggggagcgccggagttccttgtggccgacgtgcaccaaggtaggtctcgcctgggacgcgcggagggtccgggcagagggcggtaacgagcgggccacagcggagcacggccggtccacgcggcctaagtcgctgcccgctctcgcccgtgtcgcgcggcgccggccccacgtgaagcccggaggcaggaaggcgcggtgcgggctcgcgattccccggccccgcggggcgctccagcggcggctggcgccgcctcgctcggagctagggccgcgcggccctgcgcgcgcgctctcacggcgccgcgcacgcgccgcagcgacgattcaaactgcgcgagcgcgcgggccgggttgcgcgcggccgcccgggcgggggatgggtctctgccgcgaggaggatggttttgtccggcatgcgcttggagaaggcggtttgcagatcggggagggagcccttgcccgggaagagggtgggtcgtaggagctcgagggtctcccgctgtgcacctttgggagccgtgtgtcttgaactaccgcagcagctcagtctgtcagcagattatttgctggccatttattgcgtccctctcttgcggggctgggggacagtagtgagaagagcaggcccgtgtcattagcgaactatgcccttgaacccaggcgacggacgctactggcaagtcattcatacgtcacatattgacctaacttcgaccacgtgtgacttgtgtgccctagcagaagttgagtgtgtggggtgtttacggggaagccctcagggggatcccccaccctgcccaggaggctcagggatggctttccaggtgaagtgactcttgaatggggttttgaaggaacagagtttttcaggcagtctgagggtagtgggattagggtgatacaggcagagggattgcacgtgcaacggcatgaaggtataggtattgtggtcagggataccacaggtcttgcaggtgactggaggaggagagtaacaagatgatacagcaggggcctcgggtcacgaagcgtcttgtgtgccaagactcaaggaactctgcggggtggaggaggcagggaagatttcccccaagaagggtatcagagtgaaacctggacagatgaattaggagttcacgaggctcctgtttcaaagacatcccaagagcaggaatcctgttctgttcatcgttacaactttctcatcagatgcccttggcaacccacccagtcccccagagcattggtttccttatctgtaaagcaatggtagggggcatgtggtgaggatataatttttttttttttgagacggagtttccactcttattacccaggctggagtgcagtggcgcgatctcagctcactgcaacctccacctcctaggttcaagcaattctgcctcagcctgctgagcagctgagactacaggaacacaccaccaggcccagctaatttttgtatttttttttttttagtagagacggggtttcaccatgttggccaggctggtcttgaactcctgacctcaggtgatccacctgccctcagcctcccaaagtgctggaattacaggtgtgagccaccgcacccggccaattttttttttttttctgatacagaatcttggtctatcgcccaggctgtagtatagtgtcgtgctctcagtcgctgcagcctccacctcccgggttcaagcgattctcctgtctcagcctcccgaatagtaatatcctataattttcataaagcagtgaagttgtgtgtcccttcccccaggaaaaatgaacacataggcccaggcacaggttgtatagaacggggatcccaggtgagaaactcctagtgtgaaatataccacctgtgtgcctggcataacagcagctcaccaaatgtatattgttgacacatgagccctctcctcccttccctcctggggaccttacacacagagatttttcagccttagtctggcaggcaagttcttcctcctggtgtgggggacggagggcacagctgcagtggcctgggagggctctgtctccttttacagaaatcgaggctgtggtgaggtcactggaggtcagggcaggagcaccaggctccgggcagactgtctagactggcgtgcctacccactttcttcaataaataaggaaggtgaggtgggggtagggcagctccagctctggtggagcatggtcatgagactgggatttcattccacctctctgtgacctgggtcacctttccctgagcctcatcttccccttagctgtaaaactgggatgagtctgctcacctcaaagggcagctgtgggcattcaggagtgcctgatggtggaagctgactctgtagccgacttatctgtgactgtctcactcttctcccagagactgtatgctccttgaagatggaagctgtgttgtgtggggcggggtggggaagcatgatgccaaaagccaactccttattcccagcccagatactcactgcctggttaagaaaacagccagagaggccgggctcggtggctcacgactgtaaccccagcaatttgggaggccaaggtgggcagatcacctgaggtcaggagttcaagaccagcctggccgacatggtgaaaccccgtctttactaaaaataccaagcagcttagccaggcgtggtggcctgtcgcctgtagtcccagcactagggaggctgaggcgggagaatcgcttgaacctgggaggcggaggttgcagtagctgagatcgtagtctgactccagcttgggcaacagagtgaggctccatgtcaaaaagaagaaaagaaaagcaaataaaggaaaacacacccagagcagtgagagaagtctgtatacaacgacccatttgtgcagtagaggctgtgcaggcaggtaccgggaacagggctccaccttttagaaggtggtcctctggccgggagcagtggctcacgcctgtaatcccagcactttgggaggccgaggtgggtggatcatgaggtcaggagatcgagaccatcctggctaacacggtgaaaccccgtctctactaaaaatacaaaaaattagctgggtgtggtggcaggcgcctgtagtcccagctactcgggaggctgaggcaggagaatggcgtgaacctgggaggcggagcttgcagtgagccgagatcgcgccattgcctccagactgggcgacagagcgagactccaccttcaaaaaaaaaaaaaaaaaaaaaaaaagaaggtggccctccatcccctgcccttccctgcgattgccagcccagtgcagggcctcaagtcttccattttggagaggaagcctctgggactcaaagacgactcaggtgccgtctccaccgcagcagggagttgtcgccactgtccttccccacatctgtggtggatctgtcaccacccaccccaccttccctcaggctctagctgcctcattgtctcctctctggtctcaccatcctctcctcagctggcttctgctctctgcttcttggacttggccaagtgcataggggatactggggaggcctgcccagactgccttagcccctgcctggaccaaggtctgccttcagaatcagtcagataggcctgggttgcttttctaggctgccctttacttgctctgtgaacttaggccgataaagttatctttctgagcctcagttccttaactgtgaaataggagtgacagtgctgccttcttcagcttcctgtgaggaataaaagggttttgcatatggaagatacagtgagttagccggtgccccagggctcatattttaggaagttgattggtatggtggacaggcatgtaaattaaagtgattgtgatccaaaagtctgtcccagtttctcagagagaatgactagttcaggatggaggagggatcagaggaggtgactttgagacaccagtagatgttcttccagtgggataagggatgggaaggcgttccaggtaaagagatgcaaatagtatggagaggacagttagcattctggcctggtgggtctggcaaggagattgtgtgggaagagaagggaggatgtgatagataggaaatgaagctaaaggttctgtcagtacccgatgttggagacctctaatacccagctaagaaatgtgggctttatcttccaggaaaaggggaccactaaggagtccaagcaggccagcagcttgcttcaggtttgaggtttggaaagatcatgaatgaggccgggcatggtacctcacgcctataatcccagtactttgggaggtcgaggtgggaggatcacttgagcccgggagtttgagaccagcctgggcaacatagtgagaccttgtctctacaagaaaaaaaaaaattacaaattagccaagcgtggtggtacatgcctgtagtcccagctactctggaggctgaggcaggagggtcgcttgagcctaggaggtggaggttgcagtgagctgtgtacgtgctgctgcacctacagcctgggcaacagagtgagaccctgtctcaaaaaaaaataaatatatatatgtatatatatacacacacacatatttattgatcacgaatgacttgagaatgagaggaggggatgagggtggggaccggaagaccagtgaaaagttgctgtctttcctagggaaaggaggaaggaaacacagttccaggcaagctgaaaaactactagggagcatggggaggaaggaagcagaagaaatttctttttttttttttttttttttgagacgagtcttgctctgtcaccaggctggagtgcagtggcgtgatctcgactcactgcaagctctgcctcccgggttcacgccattttcctgcctcagcctcccgagtagctaggactacaagcgcccgccaccacgcctgtctaattttttgtatttttagtagagacggggtttcaccgtggtctcgatctcctgacctcatgatccgcccgcctcggcctcccaaagtgctgggattacaggcgtgagccaccgcgcccggccagaagaaatttctaataacactcaaggacggccagctctgagtctgactaactggttagatcttggcctctctccaattttgagtgagatacttcacctttctgagcctcagttttcttctctgtagagtgggatcattgtggccagcttgtagtgaaacgctccagaatattagccaaacacaactaaggagatgttgactgggtttgttccatccatgataacagattttttggttaatgccccatgacaccaacacttcatatagcccttatgtgtctgactccattccgggctgtgctcatggcagcccagccatcagcaccaactgtgctgacataattgtttcctgctttttctcctgacttcttattgtgagtacttttcatgctaatacagtctccctcccaggcacagcagactgctacagattattctgatgaactgatgagatgtttgccttggcatacagctgtctatctaaaacaagggtgcctctttttttggtggagggacagagtttctctcttgttgcccaggctggagtgcaatggtgcaaactcggcttaccacaacctccacttcctgggttcaagcgattctcctgcctcagcctcccgagtagctgggattacagcacgcgtcaccacgcctggctaattttgtatttttagtagagatggggttcctccacgttggtcaggctggtctcgaactcctgacctcaggtgatccacccgccttggcctcccaatctgctgggattacaggcgtgagccaccgtgcccggccacaaagatgcctcttatatcccacatccctaccccatctaactttgcctgcctgacatcctttctgggatggctcccaagcacttcagattgaatgaaaacacctagcaacatggagcttcacgtctcttctctcctgtttgttcaacagtgttctctatctcactacatggaagtctaccatctacctggtcatttaagcccaagcctgggagtctttgtgtttggccaagctcatagggggatcttgggcaggcctgccaagaatcctctggacttttttaggatgaacaaatcaagccaagtgctgtggcacgtgcccatgatcccaggctcttgggaagctgaggtgggaagatcgcttgagtccatgagttcgaggctgcaataagctaattgcaccactgcactccagcctaggtgacagagtgagaccccctctcttaaaaaaataaaataaaaggccaggcatggtggcttacacctataatcccagcactttgggagtccaaggctagagaatcgcttgagcccaggagttcgggaccagcctgggcaacatggcaagacgttgtttctgcaaaatatacaaaaattagccgggcgtggtggtgcacacctgtagtcccagctatccaggatggctcaagcccgggtggttgaggctgcagtgagccatgaccatgccactgcactcaagtctgggcaggaccctgtctcaaaaataaatacaaaggatgaacaaattatgagagtaaaaaagggttagtctcctttatccttgctacacctcctcacccaaagccaagcagtagtgtagcaggataagccgcagacaaaaccccccagacaccgagttaaagaaggaagggctttattcagctgggagctttggcaagattcacgtctccaaaaactgagctccccgagtgagcagttcctgtcccttttaagggcttacaactctaagggggtctgcatgaagaggtcgtgattgattgagcaagcaggggatatgtgactgggggctgcatgcactggttatcagaacggaacagaacaggacagggattttcacagtgcttttccatacgatgtctggaatctatagataacataaccggttaggtcaggggtcgatctttaaccagacacaggtcgcggcgccaggctgtctgcctgtggatttcatttctgccttttagtttttacttctttggaggcagaaattgggcataagacaatatgaggggtggtctcctcccttagtagtaaagcactataaatatttgtggatttacaaccatttcattcagtcttgatgacagccctgagaagtagtcattgcatccccttttatagatgaggatacagttcagagaggttaaggcaactggccagccacaagctctggaaggtgaacccagttccctctaatcccaaagaatgtgcactttttagtgtgggacaaggggtctcaaaagacaggtgggaggattctcagccctgggagaataaaagttgggtgaagttcagaactgccacctcatcagtcagaactgggccagtgacaacctgcagaagctcagcctgcaaaggcttatcaggattctagacctttggttactttcccatctttagtatttagttctccttccccaggataatcagcagaaaagtgcctggccttgtgtccatataccatggaggggagagctagagaggcgaggttctcgggaaccactagaaggaaggaatgagggggctgctggttaggcccagagctgagaccgagaagggctcttggagttctccttcccttcgtaacattaggtagaggcttagacaacttgattgtttttcatgaccttaaagactgtggctccggccgggcatggtggctcacagctgttgtaatcccagcactttgggaggctgaggcgggtagatcgcttgagcccaggagttctagaccagcctgggcaacttggcaaaaccctgtctctacaaaatatataaaaattagctggacactgtgatgcgcacttgtagtcccagctattctagaggctgaggtgggaggatcacctgagctcaagaggtcaaacctgcaatgagccgtgatttggccactgcacttgagcctgggcaacagagagtgagatgctgtctcaaaaaaacaaacaaacaaacaaacaaaaacaagtacttgatgactccattggggtcaattatgaagagacctcttagtgcaagaccaggaccttctaacagcacaccgaagtctcgagaaattcgcttagttaaatctgacaagggtgcgatgtttatgtggcccaaagcaccattctttcttggtgtatttatccaggcaagacggctaaagtgggaatccactgagactgcaacaacttcaaagttcacatcgtgaaattccttagctttgtcactagaagcaacaatttctgtaggacacacaaaggtgaaatccaaaggatagggctgggcgcggtggctcacacctgtaatcccagcactttgggaggctgaggtgggtggatcacctgagttcaggagttcaagaccagcctcaccaacatgtgaaatcccatctctactaaaaataccaaaaattagccaggcgtcgtggcaggcgcctgtaattccaggtactcaggaggctgaggcaggagaattggcttgaacccaggaggcggaggttgcagtgagccgagactgtgccactgcactccagcctgggtgacacagcaagactccgtctcggaaaaaaaaaaaaaaagaaagaaatccaaaggatagaagaaaagcaccaaatatttcccctcaaagtcatcaaggcttaggtctttgaactctccattgaccacggctgtacccttaaaatagggcgcatcgtgggtgacatcaggtgcatggtatgaggaactggtaccagaattttgcttgaccggaaccagaccacaatatgtttgtcaaacttgttcttccagaagcagcaggcctgagggctgcagtggcagaaatgcccccaaggaatggcactcacatgccgggcaactgatgctcagagtaaccttcccacagcagccgcgatcttcagtgcatgtgtgtttttgtttttttgagacagtgtctgtctctttcgcccaggctaaagtacagtggcacaatctcagctcaatttagcctcagcctcccaggctcacgccatcctcccacctcagcctcctgagtagccaggacttcaggcgtgcaccaccatgcccggctaatttttgtaattttttggatagaaatggggtttcgccatgttgcccacgctggtcttgaactcctgggctcaagcgatcctcctgcctcgacttcccaaagtgctaggattacaggtgtggtggcaccttgtctctaaaaaaaatcaatcaattaaataagaaaagaaaatagctcttctccccctctgattataacaacacattaccaaagttactggtgcttacatggggttgaatggagttatgatggatatttcatttaatgttgttccttcaatgttttaattttttacaacagacttaaaaattttttaaatacatgtggccaggcacgatggctcacgcctgtaatcccgcactttgggaggccaaggtgggtggatcatctgaggtcaggagttcaagaccagcgggaccaacatggagaaaccccatctctactaaaaatacaaaataagccgggcgtggtggcacatgcctgtaatcctagctactccagaggctgaggcaggagaatcacttgaacctgggaggtagaggttgtggtgagccgagattgcgccatggcactccagcctgggcaataagaacaaaactctgcttcaaaaaaaaaaaaaaaaaaaacatgtaatcggctgtacgcagtggcctcacgcctgtaatcccaggacttcgggaggctgaggcaggtggattacttgagattaggagtttgggaccagcctggccaacatggtgaaaccccgtctctactaaaaatacaaaatttgggctgggcacagtggctcacgcctataattccagcactttgggaggccaaggcggggtggatcactgagatcaggagttcgagaccagcctggccaaactggtgaaacctcgtctctactaaaaatacaaaaattagctgggtgtggtggtgggtgcctgtaatcccagctactcgagaggctgaggcaggagaatcacttgaacccaggaggcagaggttgcatgagccgagatcgcaccattgcactctagcctgggtgacagaacgagactccatttcaaaaaaacaaaaacaaaacaaaacttagcagggcatggtgatgcacacctgtaatctcagctactcggaaggctgaggcacaagaattgcttcaacccgggaggtggaggttgcagtgagctgagatcatgcctgtgcgctccagcctggcgacagagtgagactccgtctcaaaaaacagaaaaatacatgtaatgctccttgttaaacatcttagataatataggaagataaaacgaaacaagtaatgattatcttataataccattttccgaggttaccattgttaatatgggatatattttccttccccacatttttctcacatattttttgtgtatgcattttttttccaaaaaaaaaaaaaatggatgataggctgtttttcttcctttttttttttttttttttttggttggggggtggagtttcactactctttctcccaggctggagtgctgagtgcaatggcatgatcttggcctcacctcaacctccacctcctaggttcaagcaattctcctgcctcagcctcccaagtagctgggattacagtcgcacaccaccatgcctggctaatttttgtatttttttttttttttttggtggcgacggggtttcaccatgttggccaggctggtctcgaactcctgacctcaagtgatccacccaccttggcctccgaaagtgccaaagtactgggattacaggcgtgagccaccgcgcccaggcttttttttttttttttttttttgagacagtctggctctgttgcccaggctggagtgcagtggctcgatcttggctcaccacaacctccacctcgcgggttcaagcgattctcctgcctcagcctcctgagtagctgggattacaggtgcccatcactgtgcctggctaatttttgtatttttagtagagacggggttttgccatgttggccaggctggtttggaactcctgatctcaggtaatccgcccgccccggcctcccacagtgttgggattacagatgtgagccaccacacctggccgtctgtttttcattctgcttgttttacttggcaatggggaacatctttctattcaatagattgatctctgaaaacatcacttttgatggcttcatactgttctatcatgaatataccacatatttagttcactactattgaacattcgggttctgtttttgttgtttttaaaatgttatgaaggatacagtagagaatatttgtgtaattaatctgtgggtgcatccattattctgttcttgggatacattttgagaagtggaattgttgggcaattcctcttaacgtatttctagagtgtttgataaatattgtctgattggcccaggaaaatgtttgccatttctcatatgtagtatttgactgactttcaggacaggaagatgtcacccaagcgcatagctaaaagaaggtcccccccagcagatgccatccccaaaagcaagaaggtgaagggtaagttggccttggcctctttgtgggtacaggtggccccttgaaaccctaagaacccggactgggctcctttcttcctgaggcttgaagctgaagggtgtggatgtgcagagaccccacccagctggaaggtttcctgtagctcattgaatcctaccctctgggaatcacaaagtgggcagaaactcctctcaaagcactcaggcagcactggcacaaaaaaaaaaaaaaaaaaactagaccctagggcttcaccccaggcagtgatgcattatggttaggaccactgactttccgacatgggttcaagtccttgctctgccactttctagctgctgggcaagtcacttaatcccgcagtttggattatcaacttcttaaaatggcggcagccagagcagcgtcaccctctctgggctgtgtgaggatgagatgagataatggcctggcagcatttgagggaggtggctgtggtttcctctgtcctgggaccccggaggacagggaggagagaaaagccagcaccaaactgggaggggaagtgttggacccagcgctcagacagtgtctgtgcttttgcagacacgagggccgctgcctgtgccctgccgcggttcctggcgcccgctcctgccaaggtgcctgcgggccgagcctcctgaccagaaaacccgaccaggtggctcgcgccgggccctctgtgctgccagcgcggctcctcagcgtggccacatcctcggggagggctggcgcattggctgcccggggctgcgggttggggcgctttggcccacagagagccccgggcgcgcacctcccgcaaatgcgcctgtccgctcttcctcccgcccctcctgcctctccactgatgtgaggaagagtccgtttctgcagtgatttgcccgggagctgaacttattcactggcggacggcttgggcatggaggagggcttggatggagactggggagtgttctctgacccacgtagtctcccttgcttcgtgcagattctgctattataattagctttctgcggggcaaggcgtcacgcctgtcagaagatcgagacatcctggctaacacggtgaaaccccgtctctactaaaatacaaaaaattagccttgcggtggcgcgcgcctgtagtcccagctactcaggaggctgaggcagaggaatcgcttgaacccgggaggcagaggttgcaattagccaagatccaccactgcactccagactggcgacaaaggaactccgtctcaaaataacaataacaataattagctttcttttcttttttttttttttttttttttgagatcaagtatcactctgtcgcccagactggaggcggcagtggcacgatcttggctcactgccacctccgcctcccaggttcaagtgattctcctgcctcagcctcctgagtagctgagattacaggctactgttggcaaggctggtctcttaactcctgacctcaagtgatccgcccgccttggcctcccacagtgctaggattacaggtgtgagccacgcaccagcccttcttgccctctccaccaagattcatttacacgtatccagtgtctccttgtttcctttctccctttcacgtgaataatgtgctcagttcttaatctccacaaaaatcctgtgagagaggtcatttgtgtccccatttcacagatgacaaaacttagaaagttcatactaacagtctgtggcagagcaggggcttctgcacaggttgtctgatcccagagcctgtgacctctcctcgctgtcgtcatcctctacactcagggtctatcttcttcacccttcagtctcacacaggtcccacagcacagaacccggcttggtgctgacactaggccagggcgacgtgggccagctggggctgggtgagaatgtgatggagaggaagaagccggccctggtatccattccggaggatgttgtgcaggctgaggctgggggcatgcacaccgtgtgtctaagcaaaagtggccaggtaggtgttggggactggcacagggttggacaaggcctggggttgggtggcttggggcagggcttttgaaccacgcatgttcactgtggaaatggagctggctagtcaagtggggagtggcctacatgagaatggactgcgaggccagacgttgcattaatgagggcatccgtgggcacaggtctattccttcggctgcaatgatgagggtgccctgggaagggacacatcagtggagggctcggagatggtccctgggaaagtggagctgcaagagaaggtggtacaggtgtcagcaggagacagtcacacagcagccctcaccgatgatggccgtgtcttcctctggggctccttccgggtaaggctgggtctgaaagtctgcatggtcccgtgaaagacagaattaattgcggggccccaaagataatccgacttccatgcccccatggtacttactggtggggagatgaaagcccacaggtaggagctgaggcccagacccaggactctagcttcctcatgtgggcctgtccagcccactggctgcttccttgaatccgatgtcatcaagtgtctggtcctgggaagtgagtgggtcaaggatgtccctgggttgaggctgatccaggaggcctgctgtcttcacccatctccctgacttctgtctccccctcaccttgccagcactgcctcttccacacttcccagaggcttggatggggcaaggaggtgtggaggcagggattgtcgcatctcagagtttccaaggtacagaggagtgtagttgaaaaaacagattgtgggtttttgttgttgttgttgttgttgtttttgtattgttttgagatggagtttcactcttgttgcccaggctggagtgcaatagcgcaatcttggctcactgcaagctctgcctccctgattcacgccattctcctgcctctgtctcccgagtagctgggactacaggcgcccgctacaacgcccagctaattttttgtattttttggtagagacggcatttcaccgtgttagccggaatggtctcgatctcctgacctcgtgattgcccgccttggcctcccaaagtgctgggattacaggcatgagccaccgcgcccggcctcttttcttttttaattagagacgagatcctgctctgtcacccaggccagagtgcaatggcatcgtcttagctcattacagcctcaacttcctgggctcaggtgatttcttccacctcagcctcgcaagtagctggtactagaggcttgtgccaccacgcccagctaatttttgtattttttgtagggacggggtttcaccgtgttgcccaagctggtcctgagctcaagcgatctgcccacctgggcctaccaaagtgctaggattactggcatgaattaccatgcctggcccagaatagtatattgagtgcccatttacttgccacacagtttcaatgattatcagcttgtggccagacttgtttatctctatttgcatccgctctctgactccttgattattttaatgcaagtcgcagaccataaatgatttcattcataagtatttgagtatgtggcctggctcctgcccacttctccatcccatctggtgccactgacccttctggatttcactggcacggggcaggcaggactggctgataagtgcctgtcctccttctaggacaataacggtgtgattggactgttggagcccatgaagaagagcatggtgcctgtgcaggtgcagctggatgtgcctgtggtaaaggtggcctcaggtgggtctgggggcacttgctcagggcaggagttggaggaccttgttctggggctggcctagccttgggccttacagttgtggcctgcatcccttaccttttcatccttaggaaacgaccacttggtgatgctgacagctgatggtgacctctacaccttgggctgcggggaacagggccagctaggccgtgtgcctgagttatttgccaaccgtggtggccggcaaggcctcggtaagtggccttggtacctccagcagggcaaattggcaggccacccccacagtgaaggccaaacggaggaaggatttgctgtggtcaggcttcgatcagatgggcttgtggtgttggttaggactttggagacagactgctctggtagtttttggccaccctactgtctatgggactctgaacatagtttcttcatcactaagtctacctacctgtaaacctacttcattaggttgctgtgaagttaaatgagttaatgagaagaatatcaggcagatggtaagttccacgtaaatgatacccgtaatgactgtgggaatctgagcaaggcacttgtattctcttgatctcagtttccttttctataaaatagggataagagtccctacttagcctctcaagggcttttataatggaggagaattaaactcggggcagagagaagccatgtgtgtctgtctgtcactgaccgtggctttccctttgcctgcagaacgactcctggtccccaagtgtgtgatgctgaaatccaggggaagccggggccacgtgagattccaggatgccttttgtggtgcctatttcacctttgccatctcccatgagggccacgtgtacggcttcggcctctccaactaccatcagcttggtgagccccgagcccagcttcaggcatgacccagtggcctgcgttcctgtcctggctctgcactcattcattgtgcatcctttgcggggtcgtctaacccctccaagccagttttgtcatctgtaaagtgagaatgtccatatcctgatgggaggtggcctcactgtgggaggagattgagaagggcagctctcagaacaccttcacccctgatggctccggcctttcccccaggaactccgggcacagaatcttgcttcataccccagaacctaacatccttcaagaattccaccaagtcctgggtgggcttctctggtggccagcaccatacagtctgcatggattcggaaggtagggcctttacgtccttctctagtttgggggtggagtgttccctggcctaggcctagccagattcctgagaccatggtccttggagcctgggtctgttccatgggttgtaccatacatgggtccatgagagtcactctcatcctcctagagtcctggtgttcttccaagtgtgagttcaatgggggcccatgtagattctcctaggcctcctccaaaactgggaagagacactgcagatctccttctgatcgctctgggagcagggacacactcccatggacaggtggactcacctagcctgccacccattttgcctgtagcacgccctcttgctattgctcatctctctccctcctcccataggaaaagcatacagcctgggccgggctgagtatgggcggctgggccttggagagggtgctgaggagaagagcatacccaccctcatctccaggctgcctgctgtctcctcggtggcttgtggggcctctgtggggtatgctgtgaccaaggatggtgagtggggctgcctacactctgtctagttgggacctgggggtcatggttcttacccaattccccaataggctgtgatgtccactctcgggggagccggagtacagagagcagtgtttgtgatggcactttgttcctgcttctcagaagctctggcattgatgaatatgaaatgagtacacaaattattttagtaaaggtgacttattatgcagaggagagaaatagcaaagagtgagatatcactgaggcctaaggaggcaatgggactggaacccaagtctccagactcctaacccaggctgctctctcccctcaggtgaccccttcatatatcaccttgtatgttcccgctttccagggacttttacttagaatctaaatcaagaaaaaaaaaggcttagtagtcagagttgtggcaactatagcagaggagggtgtgaacaagtgaccaccaaagcctgagtgggtgagggggatagccatggaggtcctgtagaagcctggagctggcagaggtgcttgacctgaggttatctgggaagacttcctcaggaagtggggcttgcactgtaccttgaaggttccattccttgtgaaaagcaaagaatgccattccaggcagaggaacatcagggcagtctcaaaggtggctggtcctgggaacagagggtggggtaggaccttgaatgccacgcctaggagcagcctttggcagtgtgtagggactgtgctctctggtttacagagttcttttttatccatcatctccttgggttctcccaacttccctgaactcccagagtctggtaccttgccaagctgctattggccaaggccacagtccacgcccatgtcccaggtttctcctgctacagaaaggtgggctggggatcctggagacagctgtacccatttctctctcttgcaggtcgtgttttcgcctggggcatgggcaccaactaccagctgggcacagggcaggatgaggacgcctggagccctgtggagatgatgggcaaacagctggagaaccgtgtggtcttatctgtgtccagcgggggccagcatacagtcttattagtcaaggacaaagaacagagctgatgaagcctctgagggcctggcttctgtcctgcacaacctccctcacagaacagggaagcagtgacagctgcagatggcagcgggcctctccccagccctgagcactgtgtcagttcctgccttttctcatcagcagaacagaatccttttcctcttttccttcctcctctttggaattttcctgggacctacagaataaagggggggatggacagggggttttcaaaaggaacatggctcactcagagctatatggttagacgtttctccccttttccctaccttccatggtcctggttggccctggctttgcctactagaaaaccaaaacttcccccctggggttttgtgcccactctctgagaagttggggctccatcaagccccattctagtcatgtgcccctttcctgtccctaacagtccacaggcaaacaaatggtacagtcataagagccatctgtcacggacccacgcccagaggaacgtgcagaaaaaagcagagctacatggctgtgggcaactataagccaaatatttggctcagaacaggtgtccatgggacaaaaaagaacgatcctccacttgaccaagaaaaaagtgattctcccagaagcacaaagcatactcttgcccctcaggtgttgcttgtgtacatcgtacccatccattcggcttcacctgcagccaacggcctggaatcgcaaagagacaccactctgggcagagcagagcagggtatggggtggggagagggtggagggttttataaacaaacttaacagcaatattgaaaggaggtgggggattgagggagggacagagtgttggagggccagagactagtcctgagatggaaacagcaacttgtacagtggctgagaaaataggatatagttttgatttttttaattgtaaaatattttggagggagaacaaaatcttttaacattttgaataaatttagagttttataaaataggccacttgttttctacacattccctgctttttaagggagcacatattatgtgccaggcactgctgggaaagacagaataaactataaacctggtgttgaggctacaacttaagtgatgtcaagatgtcctgaggtgccaaccagctgtcagtgtgactgtaacaaaggcttcaaatctgtcaagaagtaaggaaaagttttgtttgagttttgtttgggtatttctgttttgggagtcactggattatttttaaatgctgcatagtacaatagaggcagggtggatcttttaataccaaaccaaaaaaaattttttttttttgagacagagtttttctcgtggcccaggctagagtgcaatggcgcaatcttggctcactgtatcctccgcctcccaggttcaagcaattctgcctcagcctcccaagtagctgggattacaggcatgcatcaccatgcctggctaaatttttttgtgtttttagtagagacagggtcttgccccgttggtcaggctggtcccgaacactgaccgcagatgatctgcccgcctcggcctccaaagtgctgggattataggcgtgagaccgcgcctggccgatttttttttttttttttttgagacagtcgctttctttgcccaggctggagtgcaatggtgtgatctcggctcgctgcaacctccacctcccgggttcaagtgattcttctgcttcagcgtctgaagtagctggaattacaggcacacaccaccgagcccagctaatttctaaaattatttatttatttattgaggcggagtctcgctctgttgcccaggctggagtgcagtggcatgatctcggctcactgcaacctccgcctcccaagttcaagcgattctcctgcctcagtctcccgagtagctgggactacaggcgcgtgccaccatgcctggctaatttttttgtatttttagtagagacggggtttcactatgttggccagactggtctccaactcctgacctcctgatctgcccacctcagcctcccaaagtgctgagattacaggcatgagccaccgcacccagcaatttatttatttagagactgagtttcgctcttgttacccaggctggagtgcagtggtgtgatctcagctcactgcaacctccgcttcccaggctcaagtgattctcctgcctcagtaatcccgagtagctgggattacaggcgtgcgccaccacgcctagctaattttttgtatttttagtagagatggggttttactctattggccaggttggtctcaaatgcctgacctcgtgatccacccgcctcagcctcccaaggtgctgggattacaggcgtccaagccacgcctggcctatgtgatcatagtttctattctctgttccaggcaagccccaccaggcctgctgggtgagggtcaggagcacgaggtggctgaggatggcactggcctttgctgctgggtctcctggcctgttcctctcttccgaatgttgtttggatttgctgtctcctctctggttttacattaaatcagtgagactcttggattccctctttgaaatgaaacggtgctgggcttggttccgaccccttcccctggtggcaacctgagcctgtcaccacaagcacaaggtgacagcctgtgatgacaggccatcctcaacccatagcggctctgggccagagccaggactttcctcccaaaagctgaggcagaggcttcaccccctctaggagaggaaggccaacgccaggggctttgagggtgggactgtgctctgttcactgtcatcgctgtggcagcgctaatttttcacatacgaggtgtcgttagtcacacacaaaaaagccaactgatcacagaattctaaacagcacaattctgtctgcagccttgaaaagcctgggacatttagaggtctaggaaaatatccaaagatagcaaaaatatgtgttggttctaattttttgtttgaagacagttgttgctacagaggagatggaaagcagatttagctgtaaaatttatcgatgttccaaagcaaagagaataaattggaaattgcctcatcctacaacaccaactggaagaatccaacctgttattctgttagatgttagagacacttgggaggaggacctgggaggggctgtggctgggggcaccgcccagggccagctggggtggcaggctgtgcgggttgcacacagtagataggccctggcctctgggtccaccctctgctctgagcaccatctggcacagagtgaggggctctacaagcatccagtagaagtattattattattattattccaagatgaggtttcactcttgttgcccacactggagtgcaatggcagatctcagcttactgcaacctctgcctcccgggttcaagtgattctcctgcctcagcctcctgagtagctgggattacaggcatgtgccaccatgctcagctaatttttgtatttttagtagagacgaggtttcaccaagttggataggctggtctcgaactctgacctcaggtgatccgcagcttcggccccccaaagtgcttccccagggatcttctgacctagcaatccagctatgacgggcaggtacctgggccagtgaaagctgagtaacgttagctgcggctcatctgtggaatggagacagacgtggctgtgcaaaggcctcaccaggcagtgcctcccatgctgcctaagaagaggtgtgaggcagagagagcagtgccagggtcctcgagtctggatcc

SEQ ID NO: 4138 - DNA, 2640 bp, Homo sapiens
aaatagacactttggtttgaaagatgtaaacattccaaccttggaaggtagaattcttgttgaattagatgagacatctcaagagcttgttccagaaaagaccaatgttaagccaagggcaatgaaaactattctaggtgatcaacgaaaacagatgctccaaaaatacaaagaagaaaagcaacttcaaaaattgaaagagcagagagagaaagctaaacgaggaatatttaaagtgggtcgttatagacctgatatgccttgttttcttttatcaaaccagaatgctgtgaaagctgagccaaaaaaggctattccatcttctgtacggattacaaggtcaaaggccaaagaccaaatggagcagactaagattgataacgagagtgatgttcgagcaatccgacctggtccaagacaaacttctgaaaagaaagtgtcagacaaagagaaaaaagttgtgcagcctgtaatgcccacgtcgttgagaatgactcgatcagctactcaagcagcaaagcaggttcccagaacagtctcatctaccacagcaagaaagccagtcacaagagctgctaatgaaaacgaaccagaaggaaaggtgccaagtaaaggaagacctgccaaaaatgtagaaacaaaacccgacaagggtatttcttgtaaagtcgatagtgaagaaaatactttgaattcacaaactaatgcaacaagtggaatgaatccagatggagtcttatcaaaaatggaaaacttacctgagataaatactgcaaaaataaaagggaagaattccttcgcacctaaggattttatgtttcagccactggatggtctgaagacctatcaagtaacacctatgactcccagaagtgccaatgcttttttgacacccagttacacctggactcctttaaaaacagaagttgatgagtctcaagcaacaaaagaaattttggcacaaaaatgtaaaacttactctaccaagacaatacagcaagattcaaataaattgccatgtcctttgggtcctctaactgtttggcatgaagaacatgttttaaataaaaatgaagctactactaaaaatttaaatggccttccaataaaagaagtcccatcacttgaaagaaatgaaggtcgaattgctcagccccaccatggtgtgccatatttcagaaatatcctccagtcagaaactgagaaattaacttcacattgcttcgagtgggacaggaaacttgaattggacattccagatgatgctaaagatcttattcgcacagcagttggtcaaacaagactccttatgaaggaaaggtttaaacagtttgaaggactggttgatgattgtgaatataaacgaggtataaaggagactacctgtacagatctggatggattttgggatatggttagttttcagatagaagatgtaatccacaaattcaacaatctgatcaaacttgaggaatctgggtggcaagtcaataataatatgaatcataatatgaacaaaaatgtctttaggaaaaaagttgtctcaggtatagcaagtaaaccaaaacaggatgatgctggaagaattgcagcgagaaatcgcctagctgccataaaaaatgcaatgagagagagaattaggcaggaagaatgtgctgaaacagcagtttctgtgataccaaaggaagttgataaaatagtgttcgatgctggatttttcagagttgaaagtcctgttaaattattctcaggactttctgtctcttctgaaggcccttctcaaagacttggaacacctaagtctgtcaacaaagctgtatctcagagtagaaatgagatgggcattccacaacaaactacatcaccagaaaatgccggtcctcagaatacgaaaagtgaacatgtgaagaagactttgtttttgagtattcctgaaagcaggagcagcatagaagatgctcagtgtcctggattaccagatttaattgaagaaaaccatgttgtaaataagacagacttgaaggtggattgtttatccagtgagagaatgagtttgcctcttcttgctggtggagtagcagatgatattaatactaacaaaaaagaaggaatttcagatgttgtggaaggaatggaactgaattcttcaattacatcacaggatgttttgatgagtagccctgaaaaaaatacagcttcacaaaatagcatcttagaagaaggggaaactaaaatttctcagtcagaactatttgataataaaagtctcactactgaatgccaccttcttgattcaccaggtctaaactgcagtaatccatttactcagctggagaggagacatcaagaacatgccagacacatttcttttggtggtaacctgattactttttcacctctacaaccaggagaattttgaatttaaaaataaatccaaacattttccttcatattatcaatgcttatatattccttagactattgaaattttggagaaaatgtatttgtgttcacttctatagcatataatgttttaatattctgtgttcatcaaagtgtattttagatatactctttctcaagggaagtggggatattttgtacattttcaacacagaataaaaaatgtactgtgccttg

SEQ ID NO: 4139 - DNA, 2621 bp, Homo sapiens
tgtatctgtatcaagatgatctgaagaacagcttctacctttaggaatgtctagtgttccaaaatgactagcatcttccattttgccattatcttcatgttaatacttcagatcagaatacaattatctgaagaaagtgaatttttagttgataggtcaaaaaacggtctcatccacgttcctaaagacctatcccagaaaacaacaatcttaaatatatcgcaaaattatatatctgagctttggacttctgacatcttatcactgtcaaaactgaggattttgataatttctcataatacaatccagtatcttgatatcagtgttttcaaattcaaccaggaattggaatacttggatttgtcccacaacaagttggtgaagatttcttgccaccctactgtgaacctcaagcacttggacctgtcatttaatgcatttgatgccctgcctatatgcaaagagtttggcaatatgtctcaactaaaatttctggggttgagcaccacacacttagaaaaatctagtgtgctgccaattgctcatttgaatatcagcaaggtcttgctggtcttaggagagacttatggggaaaaagaagaccctgagggccttcaagactttaacactgagagtctgcacattgtgttccccacaaacaaagaattccattttattttggatgtgtcagtcaagactgtagcaaatctggaactatctaatatcaaatgtgtgctagaagataacaaatgttcttacttcctaagtattctggcgaaacttcaaacaaatccaaagttatcaaatcttaccttaaacaacattgaaacaacttggaattctttcattaggatcctccagctggtttggcatacaactgtatggtatttctcaatttcaaacgtgaagctacagggtcagctggacttcagagattttgattattctggcacttccttgaaggccttgtctatacaccaagttgtcagcgatgtgttcggttttccgcaaagttatatctatgaaatcttttcgaatatgaacatcaaaaatttcacagtgtctggtacacgcatggtccacatgctttgcccatccaaaattagcccgttcctgcatttggatttttccaataatctcttaacagacacggtttttgaaaattgtgggcaccttactgagttggagacacttattttacaaatgaatcaattaaaagaactttcaaaaatagctgaaatgactacacagatgaagtctctgcaacaattggatattagccagaattctgtaagctatgatgaaaagaaaggagactgttcttggactaaaagtttattaagtttaaatatgtcttcaaatatacttactgacactattttcagatgtttacctcccaggatcaaggtacttgatcttcacagcaataaaataaagagcattcctaaacaagtcgtaaaactggaagctttgcaagaactcaatgttgctttcaattctttaactgaccttcctggatgtggcagctttagcagcctttctgtattgatcattgatcacaattcagtttcccacccatcggctgatttcttccagagctgccagaagatgaggtcaataaaagcaggggacaatccattccaatgtacctgtgagctaggagaatttgtcaaaaatatagaccaagtatcaagtgaagtgttagagggctggcctgattcttataagtgtgactacccggaaagttatagaggaaccctactaaaggactttcacatgtctgaattatcctgcaacataactctgctgatcgtcaccatcgttgccaccatgctggtgttggctgtgactgtgacctccctctgcagctacttggatctgccctggtatctcaggatggtgtgccagtggacccagacccggcgcagggccaggaacatacccttagaagaactccaaagaaatctccagtttcatgcatttatttcatatagtgggcacgattctttctgggtgaagaatgaattattgccaaacctagagaaagaaggtatgcagatttgccttcatgagagaaactttgttcctggcaagagcattgtggaaaatatcatcacctgcattgagaagagttacaagtccatctttgttttgtctcccaactttgtccagagtgaatggtgccattatgaactctactttgcccatcacaatctctttcatgaaggatctaatagcttaatcctgatcttgctggaacccattccgcagtactccattcctagcagttatcacaagctcaaaagtctcatggccaggaggacttatttggaatggcccaaggaaaagagcaaacgtggccttttttgggctaacttaagggcagccattaatattaagctgacagagcaagcaaagaaatagattacacatcaagtgaaaaatattcctcctgttgatattgctgcttttggaagttccaacaatgactttattttgcatcagcatagatgtaaacacaattgtgagtgtatgatgtaggtaaaaatatataccttcgggtcgcagttcaccatttatatgtggtattaaaaattaatgaaatgatataactttgattt

SEQ ID NO: 4140 - DNA, 836 bp, Homo sapiens; identical to SEQ ID NO: 970

SEQ ID NO: 4141 - DNA, 1322 bp, Homo sapiens
ggcggcctgcattgcagcggggcactgggctgcaatgggcctaggccggagtttccaagccgccaggactctgctccccccgccggcctctatcgcctgcagggtccacgcggggcctgtccggcagcagagcactgggccttccgagcccggtgcgttccaaccgccgccgaaaccggtcatcgtggacaagcaccgccccgtggaaccggaacgcaggttcttgagtcctgaattcattcctcgaaggggaagaacagatcctctgaaatttcaaatagaaagaaaagatatgttagaaaggagaaaagtactccacattccagagttctatgttggaagtattcttcgtgttactacagctgacccatatgccagtggaaaaatcagccagtttctggggatttgcattcagagatcaggaagaggacttggagctactttcatccttaggaatgttatcgaaggacaaggtgtcgagatttgctttgaactttataatcctcgggtccaggagattcaggtggtcaaattagagaaacggctggatgatagcttgctatacttacgagatgcccttcctgaatatagcacttttgatgtgaatatgaagccagtagtacaagagcctaaccaaaaagttcctgttaatgagctgaaagtaaaaatgaagcctaagccctggtctaaacgctgggaacgtccaaattttaatattaaaggaatcagatttgatctttgtttaactgaacagcaaatgaaagaagctcagaagtggaatcagccatggcttgaatttgatatgatgagggaatatgatacttcaaaaattgaagctgcaatatggaaggaaattgaagcgtcgaaaaggtcttgattctgagaatgaatttggttagttgcagaagatacattggctctaagaggatatattttgagaccaatttaatttcatttataagaacatagtaattaagtgaactaagcattcattgttttattaatactttttttctaaaataaaacttgtacaccagtttattactctaaaaagagaattacacatgccaaatggaccaatgtccatttgcttattggaggcaaagctacaatagaagtcagagcatcaccagaatggtctttaatgagcatggaacctgagcaaagggaataggtgggatgaattttttttttaattgtgaaacaattcataagcacaatatgatttacagaataataaacattcatgtacccactatcaggttaagaaatagaacatttattaatatgtaggaatgttaagaaataaaacatttaataag

SEQ ID NO: 4142 - DNA, 6586 bp, Homo sapiens
ctggggagccggcgctggaggtggtgagtggcgtggggactgtgtcgagggggtccccaaggtgccggaccctgcggaggggcgaagtttcggcactggggagggcgtgcggacgctttccctacaggcgaccactgctctgcgggcgggtggtcttagctccagtcccccattcagttcctcagcattccaggtcggcggcgaaggggtccccgaacgaagggcgcaaggcagcgtctctgctgggaccgggaagccggacttcagggcctctcggcccgtgggcttctccccgagtctccccgagtcggttggcattaagagtttagcagatactttcagaaatggatacataagaaatggctggaaatcaaatgaatgtccaaagaagagcttagggtcttagtaacattcttttttaaaataactgtctgccaaaatgtcattacacagtactcataatagaaataacagcggtgatattcttgatattccttcttcccaaaatagttcatcactgaatgccctcacccacagtagccgacttaagctgcatttgaagtcggatatgtcagaatgtgaaaatgatgatccattattgagatctgcaggtaaagtcagagacataaatagaacttatgttatttctgccagtagaaaaacagcagacatgccccttacccctaatcctgtaggtagattggcacttcagaggagaactacaaggaacaaagaatcatctttgcttgttagtgagttggaagacacaactgaaaaaacagcagaaacacgtcttacattacaacgtcgtgctaaaacagattctgcagaaaagtggaaaacagctgaaatagattctgtcaaaatgacactgaatgtgggaggtgaaacagaaaataatggtgtttctaaggaaagtagaacaaatgtaaggattgtaaataatgctaaaaactcttttgttgcctcttctgtacctttagatgaagatccacaggtcattgaaatgatggctgataagaaatacaaagaaacattttctgcccccagtagagcaaatgaaaatgttgcacttaagtactcaagtaatagaccacccattgcttccctgagtcagactgaagttgttagatcaggacacttgacaacgaaacctactcagagcaagttggatatcaaagtgttgggaacaggaaacttgtatcatagaagtattgggaaggaaattgcaaaaacttcaaataaatttgggagcttagaaaaaagaacacctacaaaatgtacaacagaacacaaactgacaacaaagtgcagcctgcctcagcttaagagcccagctccatcaatactgaagaatagaatgtctaaccttcaagttaaacaaagaccaaaaagttcctttcttgcaaataaacaggaaagatccgcagaaaatacaattcttcccgaagaagaaactgtagttcagaacacctctgcaggaaaagaccccttaaaagtagagaatagtcaagtgacagtggcagtacgcgtaagacctttcaccaagagagagaagattgaaaaagcatcccaggtagtcttcatgagtgggaaagaaataactgtggaacaccctgacacgaaacaagtttataattttatttatgatgtttcattctggtcttttgatgaatgtcatcctcactacgctagccagacaactgtctatgagaagctagcagcaccactcctagaaagagccttcgaaggcttcaatacctgtctttttgcttatggtcagactggctctggaaaatcatatacgatgatgggatttagtgaagaaccaggaataattccaagattttgtgaagatcttttttctcaagtagccagaaaacaaacccaagaggtcagctatcacattgaaatgagcttctttgaagtatataatgaaaaaattcacgaccttctggtttgtaaagatgaaaatgggcagagaaagcaaccactgagagtgagggaacatcctgtttatggaccatatgttgaagcactgtcaatgaacattgtcagttcttacgctgatatccagagttggctagaattgggaaataaacaaagagctactgctgctactggtatgaatgataaaagttcccgatctcattcagttttcaccctggtgatgacccagaccaagacagaatttgtggaaggggaagaacacgatcacagaataacaagtcgaattaacctaatagatctggcaggcagtgagcgctgctctacggctcacactaatggagatcgactaaaggaaggtgtgagtattaataagtccttgctaactttgggaaaagttatatctgcactttcggaacaagcaaaccaaaggagtgtttttattccttatcgtgaatctgttcttacatggctgttaaaagaaagtctgggtggaaattcaaaaactgcaatgattgctacgattagtcccgctgccagcaacatagaagaaacattaagcacacttagatatgctaaccaagcccgtttaatagtcaacattgctaaagtaaatgaagatatgaacgctaagttaattagagaattgaaggcagaaattgcaaagctaaaagctgctcagagaaacagtcggaatattgaccctgaacgatacaggctctgtcggcaagaaataacatccttaagaatgaaactgcatcaacaggagagagacatggcagaaatgcaaagagtgtggaaagaaaagtttgaacaagctgaaaaaagaaaacttcaagaaacaaaagagttacagaaagcaggaattatgtttcaaatggacaatcatttaccaaaccttgttaatctgaatgaagatccacaactatctgagatgctgctatatatgataaaagaaggaacaactacagttggaaagtataaaccaaactcaagccatgatattcagttatctggggtgctgattgctgatgatcattgtactatcaaaaattttggtgggacagtgagtattatcccagttggggaagcaaagacatatgtaaatggaaaacatattttggaaatcacagtattacgtcatggtgatcgagtgattcttggtggagatcattattttagatttaatcatccagtagaagtccagaaaggaaaaaggccatctggaagagatactcctataagtgagggtccaaaagactttgaatttgcaaaaaatgagttgctcatggcacagagatcacaacttgaagcagaaataaaagaggctcagttgaaggcaaaggaagaaatgatgcaaggaatccagattgcaaaagaaatggctcagcaagagctttcttctcaaaaagctgcatatgaaagcaaaataaaagcactggaagcagaactgagagaagagtctcaaaggaaaaaaatgcaggaaataaataaccagaaggctaatcacaaaattgaggaattagaaaaggcaaagcagcatcttgaacaggaaatatatgtcaacaaaaagcgattagaaatggagacattggctacaaaacaggctttagaagaccatagcatccgccatgcaagaattctggaagctttagaaactgaaaagcaaaaaattgctaaagaagtacaaattctacagcagaatcggaataatagggataaaacttttacagtgcagacaacttggagctctatgaaactctcaatgatgattcaggaagccaatgctatcagcagcaaattgaaaacatactatgtttttggcagacatgatatatcagataaaagtagttctgacacttctattcgggttcgtaacctgaaactaggaatctcaacattctggagtctggaaaagtttgaatctaaacttgcagcaatgaaagaactttatgagagtaatggtagtaacaggggtgaagatgccttttgtgatcctgaagatgaatgggaacccgacattacagatgcaccagtttcttcactttctagaaggaggagtaggagtttgatgaagaacagaagaatttctggttgtttacatgacatacaagtccatccaattaagaatttgcattcttcacattcatcaggtttaatggacaaatcaagcactatttactcaaattcagcagagtcctttcttcctggaatttgcaaagaattgattggttcttcgttagatttttttggacagagttatgatgaagaaagaactatagcagacagcctaattaatagttttcttaaaatttataatgggctatttgccatttccaaggctcatgaagaacaagatgaagaaagtcaagataacttgttttcttctgatcgagcaatccagtcacttactattcagactgcatgtgcttttgagcagctagtagtgctaatgaaacactggctgagtgatttactgccttgtaccaacatagcaagacttgaggatgagttgagacaagaagttaaaaaactgggaggctacttacagttatttttgcagggatgctgtttggatatttcatcaatgataaaagaggctcaaaagaatgcaatccaaattgtacaacaagctgtaaagtatgtggggcagttagcagttctgaaagggagcaagctacattttctagaaaacggtaacaataaagctgccagtgtccaggaggaattcatggatgctgtttgtgatggtgtaggcttaggaatgaagattttattagattctggactggaaaaagcaaaagaacttcagcatgaactctttaggcagtgtacaaaaaatgaggttaccaaagaaatgaaaactaatgccatgggattgattagatctcttgaaaacatctttgctgaatcgaaaattaaaagtttcagaaggcaagtacaagaagaaaactttgaataccaagatttcaagaggatggttaatcgtgctccagaattcttaaagttaaaacattgcttagagaaagctattgaaattattatttctgcactgaaaggatgccatagtgatataaatcttctccagacttgtgttgaaagtattcgcaacttggccagtgatttttacagtgacttcagtgtgccttctacttctgttggcagctatgagagtagagtaactcacattgtccaccaggaactagaatctctagctaagtctctcctcttttgttttgaatctgaagaaagccctgatttgttgaaaccctgggaaacttataatcaaaataccaaagaagaacaccaacaatctaaatcaagcgggattgacggcagtaagaataaaggtgtaccaaagcgtgtctatgagctccatggctcatccccagcagtgagctcagaggaatgcacacccagtaggattcagtgggtgtgaatactgatgtgtaggcacttttatgaccacccatgaaagaaaaagaacacttgctcggtaattttctttatgcaggagagtttaagagaaatcagcacagatatttcaaaaaagtccatgtctttttatctttaaaatatctatttatcaaaggccagacacagtggctcacgcctgtaatcccagcactttgggaggcgggcagatcacaaggtcaggagtttgagaccggcctggccaacatggtgaaaccccgtctctactaaaaatacaaaaatttgctgggcatggtggcgcgtgcctgtaatcccagctactaggggggctgaggcaggaggatcgcttgaacctgagaggcagaggttgcagtgagccaagatcatgccactttactccagtctgagcaacagaacgagacttagtcaaaataaataaataaataagtaaataaataaataaataaaatatcttttatctttaaagtgtttaacattggtatactgtctgtagttggttcattagtcgtttataaagggttattttctcatgagtggaaacctgaacaatcagttacctttgtgcctatgccttctctctcctcagacagctgggatgtttatggtgaaatggcctgtacaagtttaactaagacaacttaacttgcattgttaatcaaaaattcttttctcaaagggttaactggttgccattttgaatagtatgttcaagggtgtagcttcctgtttctttccaaattataagtagctacctaaatatagtataattatatattaataatatggcttgctggcacagtagtttaccctgttatctgtgtttcataatgggggctgtatgaatattatttaaaactaataaaatgttgccagaattatactaaactgttggatgagattaggagatcagaggctggaccttctcttgataatgcttgttttgttaaaggtataatgaaataatttgtatatgatttgatgaagattaaagacccttattttccacagctttaaaaaaaaacctttatttatgatcaagtaataaagataatattctacttgtgggatcttacattatggaaatagtttgacgtttttgacctcaagagtatgtataatttgaagagatactttgtaactatgcttgggtgatattgagcagttcctaaagaataattcattt

SEQ ID NO: 4143 - DNA, 2726 bp, Homo sapiens
caggagacgccaaggaaagatgggacctcccggcccagcactgccagccacaatgaataactcttcttcagagacgcgaggacacccccacagtgcctcctctccttcagagcgtgtgttcccgatgcccctgcccaggaaggcgcctctcaatattcctggcaccccagtcctcgaagactttcctcagaatgacgatgagaaggagcggctgcagcggaggcgctcgagggtctttgatctgcagttcagcactgactcacctcgcttattggcctccccctccagcaggagtattgacatttcagctactatccccaagtttacaaacacgcagattacggaacattactccacctgtatcaaactgtccactgaaaataaaatcactaccaagaatgcttttggtttgcacttgattgattttatgtcagagattcttaaacagaaagacaccgaaccaaccaactttaaagtggctgcgggtactctggatgccagcaccaagatctatgctgtgcgcgtggatgccgtccatgccgatgtatacagagtccttggggggctgggcaaagatgcaccgtctttggaagaagtagaaggccatgttgctgatggaagtgctactgaaatgggaacaaccaaaaaggctgtaaagccaaagaagaagcacttacacagaactattgagcagaacataaacaacctcaatgtctccgaagcagatcggaagtgtgagattgatcccatgtttcagaagacagcagcctcatttgatgagtgcagcacagcaggggtgtttctgtccactctccactgccaggactacagaagtgaactgctgtttccctctgatgtccagactctctccacgggagaacctctcgagttgccagagttaggttgtgtagaaatgacagatttaaaagcgcccttgcagcagtgtgcagaagatcgccagatctgcccttccctggccgggttccagtttacacagtgggacagtgaaacacataatgagtctgtgtcggccctggtagacaagtttaagaagaatgaccaggtatttgacatcaatgctgaagttgacgagagtgactgtggagacttccccgatgggtccctgggggatgactttgatgccaacgatgaacctgaccacaccgcagttggggatcatgaagagttcaggagctggaaggagccctgccaggttcagagctgccaggaagaaatgatttcccttggggatggagacatcaggaccatgtgcccccttctgtctatgaaacctggagaatattcttatttcagtcctcggaccatgtcgatgtgggctggcccggatcactggcgctttaggcctcgacgcaaacaagatgctccttcccaatcagaaaacaaaaagaagagtacaaaaaaagattttgaaattgactttgaagatgatattgactttgatgtatattttagaaaaacaaaggctgctactattctgaccaagtccactttggagaaccagaattggagagctaccacccttcctacagatttcaactacaatgttgacactctggtccagcttcacctcaaaccaggcaccaggttacttaagatggcccagggccatagggtagagactgagcattatgaagaaattgaagactatgattacaacaaccctaacgacacctccaacttttgccctggattacaggctgctgacagtgatgatgaagatttggatgacttatttgtgggacctgttgggaactctgacctctcaccttatccttgccatccacctaagacagcacaacagaatggtgacactccagaagcccaaggattagacatcacaacatatggggagtcaaacttggtagctgagcctcagaaggtaaataaaattgaaattcactatgccaagactgccaaaaagatggacatgaagaaactgaagcagagcatgtggagtctgctgacagcgctctccggaaaggaggcagatgcagaggcaaaccacagggaagctggaaaagaagcggccctggcagaagtggctgacgagaagatgcttagcgggctcacgaaggacctgcagaggagcctgccccctgtcatggctcagaacctctccatacctctggcttttgcctgtctcctacatttagccaatgaaaagaatctaaaactggaaggaacagaggacctctctgatgttcttgtgaggcaaggagattgagttcactatggagaagtcagcagcaggaggcccatcccttactcagttgccgggacatccccagtctcgggggaagaagatgccatgggcttatacccaggctgtagccaactaccaacgtgcctgtttgtttgttgctctttccttctctccatcatagtctgggtgccagcgccctgaagctccgtgctcaactgattaaactttactgccctatggtgaccatctaggagaggggagggcagagggggtgagggtactattctggattgagaaaacctatatccattctttatatcaatgtatagttttagtctcctaaattgatctgttattttccaaactattctcttgtagaaaattttccagtgggcacttaatggtgcccttgaagaacttcctaatccatgtacataaaatacatcatatgtacacttataaatgtatatagaatgctcaaaaataaaattcttaataatag

SEQ ID NO: 4144 - DNA, 2108 bp, Homo sapiens; identical to SEQ ID NO: 3713

SEQ ID NO: 4145 - DNA, 7883 bp, Homo sapiens
ttcaagtatggcagacaaaggatgttctgcgtggggaaatgtggtgacacccatttcacaaggacagctcacatagattgagtgctcaggaaggaccagcaccatacccagtgcctgatgtgtatcatctcaattagtccttgcctcagatgcaaaaggaaaccatcgccatcatcatcaccaccatcatcatcttcctcctgtgcagatggaaaggctgaggcatagagaggtgacggagtctgcccaggactgcaagcctgctggtggcagagccaggttccaatggaatgaaggctgtcatcctcagatggcagggtaggcaggtggctagagctcacttgggagaaggggaaaggacactgactttggctagggatggagcagagcttgggctggctttccatgcacgggcagggggcgtggctcatggctacgctccagccccgggtgtggacatttaatcttccaggtctaccctaggctatgggtctggacagcactgtgatggaaagaagacactctatgtcctgcattctgtgaccaatgatgtgactgtgggaatggcgctggcatctggctgccactctgggacgggtggccagctgccatcaggccccacccaggatgggaccaccatgcgacttcttccctcgctcctcctggtcatgtccagagccccaggaggaccagcaaagcctctcgagccgatggcagctcacgttctgccttgtcagctactcctctcctgggcaatattggctgcttgctgtggctctccccggggtatgtgactgcctctgtgctgggcacctggcctgggctttccttctgggcctgggcagctgggctcagcttggacccaggcagcagccacagaggggcccatggaggtgacagagttgcttctatgatggtgaacgggcagctgtgacacggaggaggcgaccactcctgagtttccaagtgctgcggtcagggccggggccagcaaagtccctcccatattcaaagagcgggtttgggtttgtcccaggaggacatagtcaggagcccatgctgggacatgcctcctccaaagttcagcctggatccccagcctctgccaacggccccgctccttagctaacccagcttgctcctgggttccacggcggagtcagatgtttctgggcagtttcacctttgtgccttaaatgcatgttgaggactttaaggaattgtggagaaatagggctgtggcaaaggcaagtgacaactgggaacaatgatcccgcagaggctgctgaggcctgggccccaggggcgtgggttcatccttctgcctgggctttggtgggaggggcagactctgtggtctgagacacaaaaaaacccaaaacatatgtgtgtacagacacacagcagagccacacacacacttgtgcccatgcacacactcacaggaggcccgtggactccgcacagggaagaaactcctccggtcgacagtggacggcgctgcagcagggactcacccccaagccctgcctgcctcccattgcccacctggccctggcttgatgggcttatctcatgctgtggccggggacctcttgcttcctgcaaccccttgctggactggggcctgggcctctcctgggctgtgcctagggtttgtaacccagggcctgtgccggcgtgcacagagcatctctccctgggaggctcagggctgcctcctcgagctctgtgggcctgcactggccggtgagcttgtggtgtgggttttcaggctgtatccttctacctcctgagcccaggggtcccaggcgccctgcagctgtctcctcggccatcctgtggggccccgaggccttgccctcacttcagtgcctgggtgctcaggctttgcccaggtgccaggagaaggtgtgagcatgagcctattggacacacctggcgacgtataccaggtgtcccacccctgccaccatggggcctcccgatacggcaaccaccacggacctgtggggaccaatgaggaaagagagaggcaggtctgggccaggctcacagggactccggcatagcagaccctgccccagcaggcccccttgtccttcctgggtcctggtccttcatgaggaactagcccatccctggtggggctcccaccccgcttctcagtgggctctatgcttgcctcgtcggagtcacccctcaggcagtcctgggatcctctcctttagacccactgtgccttcccggcctcccgggcttctgctgggggcagaagaaatgcctccccaggtctgtctctggaggctctgagggagatgggcttgggggctgtaggaggaggcagggattccagggtgtcaggaaggcaggggtgccaggtcccacctagtgaagtaataaaccgtgggtggtgatagtgacccagtgccctcactgcccagccccgcctgtcctcagccagcactgcagggatcccaggcccagactctggaggccttcactgatcccagccaccccagaaaagctgcagcctgcaggcaccagccgggccatatgcccagtgccagctagggcccaccgcccatcctgcacacggggccgctgggcaggtgcccctcacacccccaggatgtcagtgctcacctcgagcaaagcgccccagctcggccttgggaggtggtcatgtccagggggatgatggagagctgtccaaccaagagagcgggagggagggaaggagggagggagagagatagagagagagagagagagagaggaagtgtgggccctaaggctgccttagtggaggtgcgcgtggcctgcacctcaccaagcctagccactctcgcggctctgagtggctcacaggcttgtgagggccccgtcgctgcctgctgggtccccaccagggctccctctaggaatgcgccatggctgctatgacaatttgcacagcccagtggcttaaacaccatttataccacaggtccagatgaatcctgcagggccagggtctgggggtgctggaggccatgctccctccaggcttgcggggagaacttccctgcctcctccagtctctccatccctgagctctcggctcctcctccgtcttcagggccagggcgtagcgtctgctctctcggcctctgcctccgcttcccacctcacctggcttctgtctatgtcagtctccctctgccaacctcctagaaggacacttgtgattacattagggctcacccctttaatccaggggagcctctccacttcatgattttcagctaacttgcttctgcacagaccccctttccctataagggcacacattcactggtcccggggctaaggaccttgctccaagtccctccacccatgatgctgtgccttccagaaacctgtcctctgcagctcggtcttgaccccaagcctgctggtgacctgaacttcacagggttatccccttggactgtgtgcagcacgatgcaatttctgggcctgaatgtcatgctccctggggcaggaccttgagcctgcagcacacactaggccacctgcagtctcacaggccatgccctgggtagacagggaggtgctcaaccccagctcgggtcctctagtctgcctggctaccatgcttctcactctcctgcatctgcagaccctgcgttgccatgtgaggcaggggtggggtggggctgagggcgtggctttggtccctggctgtccggatgaagtaccagagtgacgccacagcccatcccggtgacatgctcacccccaacccccgtgtccgggaccccggtcttgtgtggtccctgatgtggagtcctcagtccttaagatacatccagaaagtcctggccatgaattggaggtgcagagtcctgcagagcctctgggctgggctggtgcccccaggagatggagggcctggtggatgccctcctccctcagagctggggcagctgcctcccaggggtgggactctgggctcagagagaggcccttgagctgcagctcagggggatgcgaggcttcgtggactgtgtcctggtccatgtggtgcacgtgtctccacctccaaggagaggctcctcagtgtgcacctcccccacatccgtcctctctgccggccccgggcgtctgagcagtcattccatgccagcacctctgcagcctgctgggcctcaggttctctgtgagggacctccccggccttcggcggaggtggagtaagctccgtcaaggcaggtggcttcgtcccttcctgtgagtgacaccagtgatgaaatggacccctccacacaggcatcctcagggcacagggccctgggggcaccttcctcctttcgtatttgttgagaaaaaaagtggcattgcgctcacaccaggatgctggagcagagctgacatgctcgggaaagggcagaggtcactgggggtgggaaggtcatccagtccagactcagcacctcgtgggctggtaaactgaggctcaaagtgctggtgccaggcctgaggcctcgcggtgacccctctctctggttcccagcacctgcctgagacctgccccaggcacccataacctggaattccctgtttccttgtccagggcctgaggaaatggctccccaggtctgtctctggatgctctgaggcagatgggcttgggggctctaggaagaggcagggactccagggtgtcaggaaggcaggggtgccgggtcccacccagtggagtaacaaactgtgggtggcgtttgggcctccccgccttccccactgggtgtgctggtgctggcgctgctgggtcagggctgcccgtgaccccagacaccactgtccatcctgtgaggctcccgtctgggcatgtcctgggtggattcctcctttctgttaagtagctacatgaggcaggggctcctggatccaaagcaaatgacaggaattccagagccaggtgcatccactcagggcagccagtgttggtggagctgcctctagcacatggaggagagtgaaagtcagcctgcccctctcacgagaaaagaacctggggatacctctcagcctccagcgttgcaagtgcaaggccagtggagttaatctgcaacgtgcacgagggcgtgtgtcagtggctgtgtgcaggagtgtgagtgagcaagagcaagagcgcatggctcctgctgtacctcaaggtgtgggctcctggtggctgctcagtgttcccaggggtgagaggcctcatgtatcctaggctgcctgagatttctgtgtgctgatcgcatcctcagtttcttgtccaccgcttcactggcaagagtcccaggctccaaggacaccctccctgcacatgattgggtgttaatggtggcctgggttgtgtcttcccctggggatgagggttgggtgtccatggtgccctgggctgtgtcctcccctagggatgagggtcgggcctccacgatgccctgggctgtgtgctcttatgggaatgagggttgggtgtccaagatgccctgggctgtgtccttccctggggatgagggttggatgtccaagatgccctgggctgtgtactcccctaggaatgagggctgggtgtccaagataccctgggctgtgtcctcccctggggatgagggttgggtgtccatggtgccctgggctgtgtcctcccctggggatgacggttgggtgtccatggtgccctgggctgtgtttccttggggatgagggttgggtgctatggcatcctgggcaggtgcttcctttctgcacaagggttgggtgaccatgatgtcctggcaatggcttccctgggttgcctcttttctgccatgtgggaagagcaggggaggtttagttggtctcagcacatcattctctcaggataagtagaagagtgtctgagctgtgaggccagtgctccagctttggaattgtcttccccaccctcacctccatcccatcaaagcccgacatgtcgtgtggcagcagcgaggtgggtgttggctgttctcttgggctgggggttagtcgtggacggggaaaggagagatgctggtcaaagggcatgaagtttctgctgatgggaggagtcagttcttttgatctgttgcacagcatggtgactatagttaacaataatgactatttcaaaattgctaaaagatgagattttaaatgttctcaccacaaaatgataagtgtgtgaggtgatggatatgccacttaccttgttttaatcatcccacaatatagacaggcattgtcactttgcattgtaccccaggaatcttcacatttgcttttttgtcaattaaaaatagagacacaaaaggagagaggggagagcaatagactcttcacggaaccgtgggcttctgcctccgggtaaaataaactgcaaaaaggattcccaggaaaccgttccctctttcagcccttggttacaggaagccggatttgggaaatctgcctggatgacattcacatgaacgggcacatacaggaaaacacggtaatgtaattagaatagtcagagaaaagtagccagaaatgacattcacatgaacgggcacatacaggagaaaacacggtaacgtaattagaatagtcagagaaaagtagccagaaatgacattcacatgaacgggcacatataggagaaaccatggtaacgtaattagaatagtcagagaaaagtagccagaaatgacattcacatgaacgggcacatacaggaaaacacggtaatgtaattagaatagtcagagaaaagtagccagaaatgacattcacatgaacgggcacatacaggagaaaacacggtaacgtaattagaatagtcagagaaaagtagccagaaatgacattcacatgaacgggcacatacaggagaaaacacggtaacgtaattagaatagtcagagaaaagtagccagaagaatttgcaacgtgcccttgtaacaccaaatttgatcagttttttaaaaaatgatcgttatgtaggtgattgagaagtaaatgtattcttttttaaggtaaaaatttggacccttatcatgcatacccccctctgtgctcttcaaatcaacatcattattaatatctgtacatttttgctcatctgagccagcacaggctgaggctgtcagaatggacaccttttggttgttgggtttctgtcagtttctggggtgaagctgcgtgattgagaacgtagctcttggctgccatctcggggattattaaggactgtgaactctatccacaagccatggcaatatctgtcccaccgaatgctccctctaacacactcttactcccgtgatgtgtgttaagggctccgatgatgctgaaaacagcacaggatgtgaaaaggcaggaacagttctgaagtcaaaggctgatgtcctgtttctctttccctctgtgaccgactcccttcccagtggtaacaagtacccacagcttggtttgaatttctgcacgctgttgtctgtgcactcgctcacacttacgcacacagcaggcatgtgggcgatgctgggtattttgtgtatgagtgggatgcacatacacacatctacatccatatcatgcccatgcatctgtaacttgcttttcccgtgtaagaacacttcttagagtttgttcaatgcatgtgtctgtgtgaatgattgaaggcatttctaacccattttaaagatggctacttaggaccatatggatgttgtactgatgtcatttgaccacgtccattgtttccatcttttgggctgttcttgtgtattttactttccatgtaacactgtgacattgagaattggtacctacaacagtctatttgctttacattaaatttgtaggct

SEQ ID NO: 4146 - DNA, 3997 bp, Homo sapiens
gccctgctgcccctgagcacacggacccgtccgaaccgcggggcagtgtgtcctgctgctccctgctgcggggactgtcctcagggtggtcctcacctctgcttccggcccctgtgtgcaaccctaacaaggccatcttcacggtggatgccaagaccacagagatcctcgttgctaacgacaaagcttgcgggctcctggggtacagcagccaggacctgattggccagaagctcacgcagttctttctgaggtcagattctgatgtggtggaggccctcagcgaggagcacatggaggccgacggccacgctgcggtggtgtttggcacggtggtggacatcatcacccgtagtggggagaagattccagtgtctgtgtggatgaagaggatgcggcaggagcgccgcctatgctgcgtggtggtcctggagcccgtggagagggtctcgacctgggtcgctttccagagcgatggcaccgtcacgtcatgtgacagtctctttgctcatcttcacgggtacgtgtctggggaggacgtggctgggcagcatatcacagacctgatcccttctgtgcagctccctccttctggccagcacatcccaaagaatctcaagattcagaggtctgttggaagagccagggacggtaccaccttccctctgagcttaaagctgaaatcccaacccagcagcgaggaggcgaccaccggtgaggcggcccctgtgagcggctaccgggcatctgtctgggtgttctgcaccatcagtggcctcatcaccctcctgccggatgggaccatccacggcatcaaccacagcttcgcgctgacactgtttggttacggaaagacggagctcctgggcaagaatatcactttcctgattcctggtttctacagctacatggaccttgcgtacaacagctcattacagctcccagacctggccagctgcctggacgtcggcaatgagagtgggtgtggggagagaaccttggacccgtggcagggccaggacccagctgaggggggccaggatccaaggattaatgtcgtgcttgctggtggccacgttgtgccccgagatgagatccggaagctgatggaaagccaagacatcttcaccgggactcagactgagctgattgctggaggccagctcctttcctgcctctcacctcagcctgctccaggggtggacaatgtcccagaaggaagcctgccagtgcacggtgaacaggcgctgcccaaggaccagcaaatcactgccttggggagagaggaacctgtggcaatagagagccccggacaggatcttctgggagaaagcaggtctgaaccagtggatgtgaagccatttgcttcctgcgaagattctgaagctccagtcccagctgaggatgggggcagtgatgctggcatgtgtggcctgtgtcagaaggcccagctagagcggatgggagtcagtggtcccagcggttcagacctttgggctggggctgccgtggccaagccccaggccaagggtcagctggcggggggcagcctcctgatgcactgcccttgctatgggagtgaatggggcttgtggtggcgaaggcaggacttggcccccagcccctctgggatggcaggcctctcgtttgggacacctactctagatgagccgtggctgggagtggaaaacgaccgagaagagctgcagacctgcttgattaaggagcagctgtcccagttgagccttgcgggagccctggatgtcccccacgccgaactcgttccgacagagtgccaggctgtcaccgctcctatgtcctcctgcgatctgggaggcagagacctgtgcggtggctgcacgggcagctcctcagcctgctatgccttggccacggacctccctgggggcctggaagcagtggaggcccaggaggttgatgtgaattcgttttcctggaacctcaaggaactctttttcagtgaccagacagaccaaacgtcatcaaattgttcctgtgctacgtctgaactcagagagacaccctcttccttggcagtgggctccgatccagatgtaggcagtctccaggaacaggggtcgtgtgtcctggatgacagggagctgttactactgaccggcacctgtgttgaccttggccaaggccgacggttccgggagagctgtgtgggacatgatccaacagaaccgcttgaggtttgtttggtgtcctctgagcattatgcagcaagcgacagagaaagcccaggacacgttccttccatgttggatgctggccctgaggacacgtgcccatcagcagaggagccaaggctgaacgtccaggtcacctccacgcccgtgatcgtgatgcgcggggctgctggcctgcagcgggagatccaggagggtgcctactccgggagctgctaccatcgagacggcttacggctgagtatacagtttgaggtgaggcgggtggagctccagggccccacacctctgttctgctgctggctggtgaaagacctcctccacagccaacgcgactcagccgccaggacccgcctgttccttgccagcctgcccggctccacccactctaccgctgctgagctcaccggacccagcctggtggaagtgctcagagccagaccctggtttgaggagccccccaaggctgtggaactggaggggttggcggcctgtgagggcgagtactcccaaaagtacagtaccatgagcccgctgggcagtggggccttcggcttcgtgtggactgctgtggacaaggaaaaaaacaaggaggtggtggtgaagtttattaagaaggagaaggtcttggaggattgttggattgaggatcccaaacttgggaaagttactttagagatcgcaattctatccagggtggagcacgccaatatcatcaaggtattggatatatttgaaaaccaagggttcttccagcttgtgatggagaagcacggctccggcctagacctcttcgctttcatcgaccgccaccccaggctggatgagcccctggcgagctacatcttccgacaagtgagagcaggccagagccgtctagtgtcagcagtgggatacctgcgcttgaaggacatcatccaccgtgacatcaaggatgagaacatcgtgatcgctgaggacttcacaatcaagctgatagactttggctcggccgcctacttggaaaggggaaaattattttatactttttgtgggaccatcgagtactgtgcaccggaagttctcatggggaatccctacagagggccggagctggagatgtggtctctgggagtcactctgtacacgctggtctttgaggagaaccccttctgtgagctggaggagaccgtggaggctgccatacacccgccatacctggtgtccaaagaactcatgagccttgtgtctgggctgctgcagccagtccctgagagacgcaccaccttggagaagctggtgacagacccgtgggtaacacagcctgtgaatcttgctgactatacatgggaagaggtgtgtcgagtaaacaagccagaaagtggagttctgtccgctgcgagcctggagatggggaacaggagcctgagtgatgtggcccaggctcaggagctttgtgggggccccgttccaggcgaggctcctaatggccaaggctgtttgcatcccggggatccccgtctgctgaccagctaaacaccaattttttcctgcttttctccacttggtttggaaaatcacacagttttcaggctccatctgtttggagaaaatacattctgaagcatccccaattcaccttctaaaaactcatgtgcaggtttgataaacaccagaacagaagacagtgatgctgtattattttagatttattacatagatttggaattcacttttttcatgacctagaaaaaaacattccagtgttcaactgttttatattattaaagggcttttaatttgtg

SEQ ID NO: 4147 - DNA, 6942 bp, Homo sapiens
ggcatggaacctaaagactagaggcggttgtgtgagtcaggaagaggggccagatatctgagtgttcctctttagtttcttcaattgcagataatatggtgtctaattttatgttgttcaggaaagacagtggttcctgactcaggaagacagtctcagaaacatgtggaatgatattgagctgctaacaaatgatgataccggaagtgggtacctgagtgtcggttcaagaaaagaacatggaactgctttatatcaagtagatttgctagtgaagatctcttctgaaaaggcctcattaaatccaaagatacaggcatgcagcttaagtgatgggtttattattgtagccgaccaatcagtgatattgcttgacagtatttgtagatcacttcaattgcatcttgtctttgatactgaagtggatgtagttggcctttgtcaagaaggaaagtttcttttggttggcgagagaagtggcaacctacatcttattcatgtaacatcaaaacaaacactactcactaatgcatttgttcagaaagctaacgatgaaaatcggcggacttaccagaatcttgtcattgagaaggatggttcaaatgaaggtacctattatatgctacttcttacatacagtggatttttttgtattacaaaccttcagcttttaaaaattcaacaagcaattgagaatgtagacttcagtacagcaaaaaagttacaaggacaaatcaagtccagttttatttctactgaaaattatcatactcttggttgtctcagtcttgtggctggagatttagcaagtgaagttcctgtgataattgggggaaccggtaattgtgcattctcaaaatgggaaccagattcttccaagaaaggaatgacagttaagaaccttattgatgcagagattattaaaggtgcaaagaagttccagctgatagacaatctactttttgttcttgatactgataacgtgctgagtttatgggatatttacactctaactcctgtatggaactggccctctcttcacgtagaagagtttcttcttactacagaagcagactctccttcatcagtcacgtggcaaggaattacaaatctcaaattaatagctctgacagcttcagctaataagaagatgaaaaacctcatggtttattcattacctacaatggaaatactatattctttggaagtatctagtgtttcttctctggtccaaacaggaattagcacagataccatataccttttagaaggagtttgcaaaaatgatccaaaattgtctgaagactcagtctctgtgttagtactcagatgtcttacggaagctttaccagaaaacagattgagtcggttacttcacaaacacagatttgctgaagctgagagttttgccattcagtttggactagatgttgagcttgtttacaaggtcaagtcaaatcatatattggagaaactggcattgagttctgtggatgccagtgaacagaccgaatggcaacaacttgtagacgacgctaaggaaaatctacataagatccaggatgatgaatttgtggtgaattactgcctgaaagctcagtggataacctatgaaaccactcaagagatgctgaattatgccaaaaccaggcttttgaagaaagaagataaaactgctctcatttattctgatggcttgaaagaggtgctaagagctcatgcaaaattgactactttttatggagcatttggaccagaaaaattcagtggcagttcttggattgaatttctaaataatgaagatgatcttaaagatatttttttacagctaaaagaaggaaaccttgtttgtgcacagtatctttggcttcgacatcgggcaaactttgaaagcagatttgatgtgaaaatgctggagagcttgctcaactcaatgtctgcatcagtctctttgcaaaagctgtgtccatggtttaaaaatgatgtgattccatttgtaagaaggactgtgcctgaaggacagataattcttgcaaaatggttggaacaagcagccaggaaccttgaattaactgataaggcaaattggccagaaaatggacttcaattggcagagatattttttacagcagaaaaaacagacgagttgggattggcatcttcctggcattggatttccttgaaagattatcagaacacagaggaagtatgtcagctaaggactttggtaaataacttgcgagagttgatcacgttgcataggaagtacaactgcaaattagccctctctgattttgagaaggaaaatacaaccaccatagtgttccgaatgtttgataaagtgctggccccagagcttattccctccatcttagagaagtttataagagtttacatgagagaacatgacttgcaagaggaggaacttctcttgctgtacatagaggatttactgaatagatgcagctcaaagtccacatcactctttgaaacagcatgggaagcaaaggccatggcagtaatagcgtgtttatctgacacggacctcatatttgatgccgtgctcaagatcatgtatgcggcagtggttccttggagtgcagctgtggagcaactggtgaaacagcacctggaaatggaccatcccaaagtcaagttattacaggaaagttacaaactaatggagatgaaaaaacttttacgaggctatggaataagagaggtaaatctcttaaacaaggaaataatgagagtggttagatacattctcaaacaagatgtcccatcttctttagaagatgctttaaaggtagcccaagcgtttatgttatctgatgatgagatctacagtctaagaattattgacctgattgatagagaacagggtgaagactgtctccttctgttgaagtctttgcctcctgctgaagctgagaaaactgcagaaagagtcatcatatgggcacgactggcattacaagaagagccagatcattctaaagagggcaaggcctggagaatgtctgtagcgaagacatccgtggacattcttaagatactatgtgacattcagaaagacaatctgcagaagaaggacgaatgtgaagaaatgttgaaactatttaaagaggttgctagcttacaggagaactttgaggtctttctttcatttgaagattatagcaatagttccctggtagcagatctccgtgagcagcacattaaagctcacgaagttgcacaggcgaaacacaaacctgggagcaccccagagcccatagctgctgaggtgaggagcccaagcatggaatcaaagctgcacagacaggcactggccctgcagatgtccaaacaagagctggaggcagagctgaccttgagagccttaaaagatgggaacatcaaaacagcactgaaaaaatgcagcgacttgtttaagtatcactgcaatgctgacactgggaaattgctatttctgacatgtcagaagctttgtcagatgttggctgataatgtcccagtgacagtgcctgtgggactgaatcttccttccatgatacatgatctagcaagccaagctgccaccatttgcagtccagattttttactagatgctttagaactatgtaaacatactttaatggctgtagagctttccagacaatgccaaatggatgactgtggaatcctcatgaaagcttcttttgggacacataaagatccatatgaagagtggtcttacagtgacttcttcagtgaagatggaattgttcttgagtcacagatggtgcttccagtgatttatgaactgatttcatctcttgtgcctctagctgaaagcaagagatatcccttggagtctaccagtttgccatactgctcccttaatgaaggagatggccttgttttacctgttataaattccatctctgccctgcttcagaatcttcaggaatctagccagtgggagctagccctaagatttgtggttggttcatttggtacctgtcttcagcactctgtgtcaaacttcatgaatgccactttgagtgaaaagttatttggagagactacattagttaaatcaaggcatgttgttatggaattgaaagaaaaagctgttatatttatcagggaaaatgctacaacactactgcacaaagtatttaattgtcgcttggtagatcttgacctggcgttgggttactgcactctcttacctcaaaaagatgtgtttgaaaatctctggaagctcatagataaagcatggcagaattacgacaaaatcttggcaatatctctggtgggctctgagctggcaagtctctatcaggaaatagaaatggggcttaagttccgtgaactcagtactgatgcccagtggggcattcgtcttggtaaacttggtatttcttttcaaccagttttcaggcaacattttctcaccaagaaagacctcattaaagctcttgtggagaatatagatatggacacaagcctcattttggaatattgcagcacatttcagttggactgcgatgcagttcttcagctcttcattgaaacgctgctccacaacacaaatgccggccaaggccagggagatgcaagcatggactctgcaaagcggcggcatcccaaactcctggccaaagcccttgagatggttcctttactgacgagcacaaaagatttggtcatcagtcttagtggaatactacataagctggatccttatgactatgaaatgattgaagttgtcttgaaagttatagaacgagctgatgaaaagataaccaatattaatattaatcaggcattgagtattctgaaacatttgaagtcatacagaagaatttctcctcccgtggatctagaatatcagtatatgttggaacatgtcataactttgccatcagctgcccaaactagactgccttttcacctgatattctttggcacagcacagaacttctggaaaattctctctacagaactcagtgaagaatctttcccaacattgctcttaatttcgaaattaatgaagttctctctggacactctgtacgtgtctacagcaaaacacgttttcgaaaaaaaactgaagccaaagctcctgaagttaacacaagctaaatcctcaacactgattaacaaggaaataactaagatcacgcagaccatcgaatcctgcttactctctatagtcaacccagagtgggctgtagctattgccatcagccttgcccaggatatccctgaaggttccttcaagatatctgctttgaaattctgcctttatttagctgagagatggctacagaatatcccatcgcaggacgaaaaacgtgaaaaagccgaggctttgttgaagaagcttcatatccagtaccggcgatcgggcacagaagctgtgctcatagcccacaagctgaacactgaggaatatttaagagtgatcggaaagccagcacatcttattgtcagtctctacgaacatcctagcatcaatcaaagaattcagaattcatctggcacagattatcctgatattcatgcagcagctaaagaaatagccgaagtcaatgaaattaatttggaaaaagtctgggacatgttgttggaaaaatggctatgcccttcaacaaaacctggtgaaaaaccatcagaattatttgaacttcaagaagatgaagccctacgaagagtgcagtatctcctcctgtctcgtccaattgattatagttcaagaatgctgtttgtatttgcaacatcaactacaaccacattaggtatgcatcagttaacttttgcccatagaactcgagctcttcagtgtctcttctatttggctgacaaggaaactatagaatctctctttaaaaaacccattgaagaagtgaaatcttatttgagatgtataacttttctggcatcatttgagactttgaatatccccatcacatatgaattattttgcagcagtcctaaagaaggaatgattaagggtctgtggaaaaaccacagccacgagtccatggcagtaagattggtgactgagctgtgtttagaatacaaaatctatgacctgcagctttggaatggactcttgcaaaagcttctgggcttcaatatgattccttatctaaggaaagttttaaaagccatctccagtatccattctttatggcaggttccctacttcagcaaagcgtggcagcgtgtgatacagataccactgctttcagcctcttgtcctttaagtcctgatcagctgtcagattgttctgagagtctcatcgctgtcctcgaatgtccagtctcaggtgatcttgacctgatcggagtcgccaggcagtatatccagttagaacttccggcttttgcattagcttgtctgatgctcatgccccactcagagaaaagacaccagcaaattaagaattttctgggttcctgtgaccctcaggttattttaaagcaattggaagagcatatgaacacgggccagctagcaggattttcacatcaaattagaagtctgattttgaataatatcatcaataagaaggagtttgggattttggcaaagaccaaatactttcaaatgttgaagatgcatgcgatgaataccaacaatatcactgagctagtgaactatttggcaaatgacttaagtttagatgaagcttcagtcttgataactgaatattcaaagcactgcgggaaacctgtgcctccagacactgctccctgtgaaattctgaagatgtttcttagtggattatcgtaaatcactgaacctttttttcaagaaggacaagaattttggagtctgctattaatggaccatatttattacagtttttaaattgtacaatctctgtattatagctatttgtctaacattaccccacatgtaataaataaaacaatatgagc

SEQ ID NO: 4148 - DNA, 2470 bp, Homo sapiens
ttggcgggcggaagcggccacaacccggcgatcgaaaagattcttaggaacgccgtaccagccgcgtctctcaggacagcaggcccctgtccttctgtcgggcgccgctcagccgtgccctccgcccctcaggttctttttctaattccaaataaacttgcaagaggactatgaaagattatgatgaacttctcaaatattatgaattacatgaaactattgggacaggtggctttgcaaaggtcaaacttgcctgccatatccttactggagagatggtagctataaaaatcatggataaaaacacactagggagtgatttgccccggatcaaaacggagattgaggccttgaagaacctgagacatcagcatatatgtcaactctaccatgtgctagagacagccaacaaaatattcatggttcttgagtactgccctggaggagagctgtttgactatataatttcccaggatcgcctgtcagaagaggagacccgggttgtcttccgtcagatagtatctgctgttgcttatgtgcacagccagggctatgctcacagggacctcaagccagaaaatttgctgtttgatgaatatcataaattaaagctgattgactttggtctctgtgcaaaacccaagggtaacaaggattaccatctacagacatgctgtgggagtctggcttatgcagcacctgagttaatacaaggcaaatcatatcttggatcagaggcagatgtttggagcatgggcatactgttatatgttcttatgtgtggatttctaccatttgatgatgataatgtaatggctttatacaagaagattatgagaggaaaatatgatgttcccaagtggctctctcccagtagcattctgcttcttcaacaaatgctgcaggtggacccaaagaaacggatttctatgaaaaatctattgaaccatccctggatcatgcaagattacaactatcctgttgagtggcaaagcaagaatccttttattcacctcgatgatgattgcgtaacagaactttctgtacatcacagaaacaacaggcaaacaatggaggatttaatttcactgtggcagtatgatcacctcacggctacctatcttctgcttctagccaagaaggctcggggaaaaccagttcgtttaaggctttcttctttctcctgtggacaagccagtgctaccccattcacagacatcaagtcaaataattggagtctggaagatgtgaccgcaagtgataaaaattatgtggcgggattaatagactatgattggtgtgaagatgatttatcaacaggtgctgctactccccgaacatcacagtttaccaagtactggacagaatcaaatggggtggaatctaaatcattaactccagccttatgcagaacacctgcaaataaattaaagaacaaagaaaatgtatatactcctaagtctgctgtaaagaatgaagagtactttatgtttcctgagccaaagactccagttaataagaaccagcataagagagaaatactcactacgccaaatcgttacactacaccctcaaaagctagaaaccagtgcctgaaagaaactccaattaaaataccagtaaattcaacaggaacagacaagttaatgacaggtgtcattagccctgagaggcggtgccgctcagtggaattggatctcaaccaagcacatatggaggagactccaaaaagaaagggagccaaagtgtttgggagccttgaaagggggttggataaggttatcactgtgctcaccaggagcaaaaggaagggttctgccagagacgggcccagaagactaaagcttcactataatgtgactacaactagattagtgaatccagatcaactgttgaatgaaataatgtctattcttccaaagaagcatgttgactttgtacaaaagggttatacactgaagtgtcaaacacagtcagattttgggaaagtgacaatgcaatttgaattagaagtgtgccagcttcaaaaacccgatgtggtgggtatcaggaggcagcggcttaagggcgatgcctgggtttacaaaagattagtggaagacatcctatctagctgcaaggtataattgatggattcttccatcctgccggatgagtgtgggtgtgatacagcctacataaagactgttatgatcgctttgattttaaagttcattggaactaccaacttgtttctaaagagctatcttaagaccaatatctctttgtttttaaacaaaagatattattttgtgtatgaatctaaatcaagcccatctgtcattatgttactgtcttttttaatcatgtggttttgtatattaataattgttgactttcttagattcacttccatatgtgaatgtaagctcttaactatgtctctttgtaatgtgtaatttctttctgaaataaaaccatttgtgaatat

SEQ ID NO: 4149 - DNA, 3248 bp, Homo sapiens
ctagaacgaaaggagtgaggcgccgagagcccagataccattttggcgtgagagctggtggttggcaaggccgcgggagtgggaagcgtccgccatgttctgcgaaaaagccatggaactgatccgcgagctgcatcgcgcgcccgaagggcaactgcctgccttcaacgaggatggactcagacaagttctggaggagatgaaagctttgtatgaacaaaaccagtctgatgtgaatgaagcaaagtcaggtggacgaagtgatttgataccaactatcaaatttcgacactgttctctgttaagaaatcgacgctgcactgtagcatacctgtatgaccgcttgcttcggatcagagcactcagatgggaatatggtagcgtcttgccaaatgcattacgatttcacatggctgctgaagaaatggagtggtttaataattataaaagatctcttgctacttatatgaggtcactgggaggagatgaaggtttggacattacacaggatatgaaaccaccaaaaagcctatatattgaagtccggtgtctaaaagactatggagaatttgaagttgatgatggcacttcagtcctattaaaaaaaaatagccagcactttttacctcgatggaaatgtgagcagctgatcagacaaggagtcctggagcacatcctgtcatgaccatgcgccgaggcacttccaggcttcactcaactcatggactcctctgtactcactctctccaccctcccttcacctccctctttgattttagaagctatagacattgtttaagataactaagaatacttggctaagaagtataatttgctaactattaaggactttctttttttaatgttgtacactattcttcctactcttttttggttttggttttgttttgtagagactgtctcactatgttgcccaagctggtctcaaactcctggcctcaagcagtcctcccaccttagcttctcaaagtgttgagatcacaggcgtgagccactgcacccgacccctactcctttttctaataagctgtatctgtaatcacagcattcctacagttgttacagtgtgttttttaaatgaaagtaaacatggttacatttgaatctcttaaataatcagtcacttggctggacaggaagaaggtagatcctgtgtgtcttgttttctggtcatgtgtattgtacaagctagagagctgaatttctgagatacacattttcaaatcacatgcaagtgaagatgatggtctgtagaaattttcagtatatataatgtttaatgacatactaatttatcatctggctatttgggaaggaaggacacacatggattttgcacatttccaccatggtggctggtgtggcttgtggctatggggtgatcaccagtatcaccactttggaaggggacagtgaaattggggctagagaaggaactttgtacagttttccctgagattcagattgactgaaaagtcacatgaagagttgattgtcttttaatggtatgttttaaacagctgacattttaaattttgatgaaatccagtttattcgtttgttcttttatgctttgggtgttgcatccgagaaatcttttcccatcccaagatcacaattttttttcctttttacttctagaagtgttataattttaagctttatactttggtctatgacccgtttttttttttgttttgttttgttttttcgtttgtttctttgttttgagatggagtcttgttctgtcacccaggctggggtgcagtggcgtgatcttggctcactgcaatctctatcccctgggttcaagtgattctcttgtctcagcctcccaagtagctgggattacaggcacaggccgccacgcccggctaatttttgtatttttagtagagacagagttttaccatgttggccaggctggtttcaaactcctgacctcaagtgacccaccttggcctcccaaagttttgggattacaagtgtgggccaccgcggccagcctatgatccattttgaatgaattttttatatggtgcaaggtgtcaatccaccttcactttttcttgggaatatagatatccagctgtttcactaccattttttgaaaggactgccctttgctctatcacctttgcatttttgttaaaaagtagttgtcaatgtatatgtgggtttatttcaggactctgttttgttccattgacctgtttttctctcctgaatgccaataccatatttgtatgtagtgtatgtaattttctaataattcttgaaacagatagtattaatgcgtcatatttttgctgttgtttgtattttttgtggagatggggtttcaccatgttggccaggctgtgttgaactcctgagctaaagcaatacacttgcctcgtcctccccatgtgctgggattacaggcgtgagccttggtgctggcccagtgtaccacatttctttttgagatttgttttggctatgttaagtcctttgcttttgatgtgaaatttgggaacaggcagggtgtggtggcttatgcctgtaatcctagaactttgggaggcctagatgggtggatcacttgagctcaggagttccagaccagcccgggcctatggcgaaactccgtctctacaaaaaatagaaaaaattagccaggtgtggtggtgcatgcctgtagtcacagttacacggcaggctgaggtgggaggatcacttgaaccccagaggtcaagactgcagtgagctgagatcacaccactgtactccagcctgggtgacaaagtgagactctatctcaaaaagaaattaggatcaacttgtcaatttctacaacaacaacaacaaaaacccctgttgggcaccttgattgagattgcattgaatttatataaaactgttgggagaattgacatcttaataatattgagtcttctggcctataaacaaggtctgtcttcctaggtattaatgttttgtcttctatttctcttaataatcttttgtagttttcagtgtacaggtctaccatgtcagcatttcatagttttgatgctaaatggtattttaaaatttcaaattctaaccacttgttgctagtaaatagaaatacaattgatgttgaacttgtatccttcagccttgctaaactgtgagttctcatggtgtttttgtaaattacatcaacagtcatgtgttctatgaataaagagttttactccttc

SEQ ID NO: 4150 - DNA, 2625 bp, Homo sapiens; identical to SEQ ID NO: 2719

SEQ ID NO: 4151 - DNA, 1479 bp, Homo sapiens
cgagctgccatgagcctctgggtggacaagtatcggccctgctccttgggacggctggactatcacaaggagcaggcggcccagctgcggaacctggtgcagtgtggtgactttcctcatctgttagtgtacggaccatcaggtgctggaaaaaagacaagaattatgtgtattttacgtgaactttatggtgttggagtggaaaaattgagaattgaacatcagaccatcacaactccatctaaaaaaaaaattgaaattagcaccattgcaagtaactaccaccttgaagttaatcctagtgatgctggaaatagtgaccgagtagtcattcaggagatgttgaaaacagtggcacaatcacaacaacttgaaacaaactctcaaagggattttaaagtggtattattgacagaagttgacaaactcaccaaagatgctcagcatgccttgcgaagaaccatggaaaaatatatgtctacctgcagattgatcttgtgctgcaattctacatctaaagtgatcccacctattcgtagtaggtgcttggcggttcgtgtgcctgctcccagcattgaagatatttgccacgtgttatctactgtgtgtaagaaggaaggtctgaatcttccttcacaactggctcatagacttgcagagaagtcttgtagaaatctcagaaaagccctgcttatgtgtgaagcctgcagagtgcaacaatatccttttactgcagatcaagaaatccctgagacagattgggaggtgtatctgagggagactgcaaatgctattgtcagtcagcaaactccacaaaggctccttgaagttcgtggaaggctgtatgagcttctaactcattgtattcctcctgagataataatgaagggccttctctcagaactgttacataattgtgatggacaactgaaaggggaggtggcacaaatggcagcttactatgagcatcgtctacagctgggtagcaaagccatttatcacttggaagcgtttgtggccaaattcatggcactttataagaagttcatggaggatggattggaaggcatgatgttctgacttctgtcagttattcttgcaaagatttctcagtatcagtatttacatacagcttatattaaaagagctgtgggtaaattaactgaacttaatcatgtcgtatttgggtttttttggtaataacttctctgtgaactattaatcatcctctgagttaaataattgctcctatactattgaagtatgtagttttgtacataacttagagactttagagtctaagaaaatgatcttaatttactttaagcattggttattcaagtattcattgttgatcctcctattctcttccgtctaatctctcacctgctaaaggagatttacacattagaaagcaaagattattttcatttatccagatgaccattttctgccacaggtaacatgattgtttgacgg

SEQ ID NO: 4152 - DNA, 1924 bp, Homo sapiens
taggaaactaacattatggatttttccaagctacccaaaatactcgatgaagataaagaaagcacatttggttatgtgcatggggtctcaggacctgtggttacagcctgtgacatggcgggtgcagccatgtatgagctggtgagagtgggccacagcgaattggttggagagattattcgattggagggtgacatggctactattcaggtgtatgaagaaacttgtggtgtgtctgttggagatcctgtacttcgcactggtaaacccctctctgtagacgttggtcctggcattatgggagccatttttgatggtattcaaagacctttgtcggatatcagcagtcagacccaaagcatctacatccccagaggagtaaacgtgtctgctcttagcagagatatcaaatgggactttacaccttgcaaaaacctacgggttggtagtcatatcactggcggagacatttatggaattgtcagtgagaactcgcttatcaaacacaaaatcatgttacccccacgaaacagaggaactgtaacttacattgctccacctgggaattatgatacctctgatgttgtcttggagcttgaatttgaaggtgtaaaggagaagttcaccatggtgcaagtatggcctgcacgtcaagttcgacctgtcactgagaagctgccagccaatcatcctctgttgactggccagagagtccttgatgccctttttccgtgtgtccagggaggaactactgctatccctggagcctttggctgtggaaagacagtgatatcacagtctctatccaagtattctaacagtgatgtaatcatctatgtaggatgtggtgaaagaggaaatgagatgtctgaagtcctccgggacttcccagagctcacaatggaggttgatggtaaggtagagtcaattatgaagaggacagctttggtagccaatacctccaatatgcctgttgctgctagagaagcctctatttatactggaatcacactgtcagagtacttccgtgacatgggctatcatgtcagtatgatggctgactctacctctagatgggctgaggcccttagagaaatctctggtcgtttagctgaaatgcctgcagatagtggatatccagcctatcttggtgcccgtctggcctcgttttatgaacgagcaggcagggtgaaatgtcttggaaatcctgaaagagaagggagtgtcagcattgtaggagcagtttctccacctggtggtgatttttctgatccagttacatctgccactcttggtatcgttcaggtgttctggggcttagataagaaactagctcaacgtaagcatttcccctctgtcaattggctcatcagctacagcaagtatatgcgtgccttggatgaatactatgacaaacacttcacagagttcgttcctctgaggacgaaagctaaggaaattctgcaggaagaagaagacctggcagaaattgtacagcttgtgggaaaggcttctttggcagaaacagataaaatcactctggaggtagcaaaacttatcaaagatgatttcctacaacaaaatggatatactccttatgacaggttctgcccattctacaagacagtagggatgctgtccaacatgattgcattttatgatatggctcgtagagctgttgaaaccactgcccagagtgacaataaaatcacatggtccattattcgtgagcacatgggagacatcctctataaactttcctccatgaaattcaaggatccactgaaagatggtgaggcaaagatcaaaagcgactatgcacaacttcttgaagacatgcagaatgcattccgtagccttgaagattagaagccttgaagattacaactgtgatttccttttcctcagcaagctcctccggaat

SEQ ID NO: 4153 - DNA, 2309 bp, Homo sapiens
  misc_feature (1)..(2309): n=a,t,g or c
tttgtcttcaagagtttttcgagaccagggaagaaggaaggaaatgcccagtttgatcgtgggagtggtaaaatgataaagtagatctgggtggggtttgtagcaccagagcataatggagaaacaccttggttttgtaatcaagactggatctaccagtgacttgctgaataacttcggtgattcctttctcttcttgggtctcactgtatttcaaaacatgaagaatttcattgtaatgttacctaataagtgagccagcacttctactctgtgagaaagtaggaaaactcttgggacaatcagagatgatgtgatgtaatgtccattagttcttcctgtgaataatcctgagggaaagcccccaggtccctcccagaatggggtggatatttcccaatacagctaaggaattatcccttgtaaataccacagacccgccctggagccaggccaagctggactgcataaagattggtatggccttagctcttagccaaacaccttcctgacaccatgagggccagcagcttcttgatcgtggtggtgttcctcatcgctgggacgctggttctagaggcagctgtcacgggaggtgagtgaacaggtgacctgctgggctgggttggactaaggggagaccctctggacaccctgggccaggacagggagcactactgaagcagtaggcagcactggagcccagatttcagctttctgttctttgccatcatattcagaaaaaataggactttggctggtggactccacgtgctttccacctcagtgactgagatatcaggactgtttgtggaagtaatgttggtatgtggccttggcctcagatgtcaatacctgtgcagaatgtgcaataaaataatgaactccaggattttaaaccttgggtgtggacacagtccccgtttctctgccccataaaagcactggagtaatcagtactctaaaaggaggttaagaaacaacaagccttcaggaatcatgttgtttgaggacccccattttataaggagggaaccaaaaatgtagaaatgagtgagcaattgccaaggtaattcccagagccaggatggggctcaagtctcctagtatgtggctcagggttctttcctactccaatgcacttcctaacaaatgacaatgtgtcctcttcactgctgggtgtcaccccagtctgaccactgctcctgagagacttggagtggaggaagggggaagaaacaaatactcaagggaactctggtcctgtagaccaccccaaaaaaggaagagccttccaagagtgtagctcccagaggtgtaccttccctactcaggccatggtttgaggatgctgcagtaagcagtggatggacccagacccagaggaaagacatggcagctgaagcagaggcttactgggtataaatgtgggctcgtttcttcttttaacagttcctgttaaaggtcaagacactgtcaaaggccgtgttccattcaatggacaagatcccgttaaaggacaagtttcagttaaaggtcaagataaagtcaaagcgcaagagccagtcaaaggtccagtctccactaagcctggctcctgccccattatcttgatccggtgcgccatgttgaatccccctaaccgctgcttgaaagatactgactgcccaggaatcaagaagtgctgtgaaggctcttgcgggatggcctgtttcgttccccagtgaggtgagcactagctggagaacgaggagacccctgaagacacaaaagaaggctgagcggtggggaagcatcccaggttggtgggagggaggttgtgggaggtgacagaaagactgggagactgaggggtctgagaggctataaccagagtgcctagaaggatgatctgtcttcctcactgcctctgagtgctttgatgtgctgactctcacctctgatactcttctcttccacagagggagccggtccttgctgcacctgtgccgtccccagagctacaggccccatctggtcctaagtccctgctgcccttccccttcccacactgtccattcttcctcccattcaggatgcccacggctggagctgcctctctcatccactttccaataaagacttccttctgctccacttgtttctggttcctatgacttctgggctcctggatgctttggggaaatggatgtagaattgggacttcttctctccagtgaagaggggaaacggtcccatggtgaaagagagcaggnnggaggaaacaaggaggcacatgctagggcttcatattacaatccaataatcag

SEQ ID NO: 4154 - DNA, 1778 bp, Homo sapiens; identical to SEQ ID NO: 439

SEQ ID NO: 4155 - DNA, 3107 bp, Homo sapiens
aagcggcaggagcagcgttggcaccggcgaaccatggctgggattttctatttcgccctattttcgtgtctcttcgggatttgcgacgctgtcacaggttccagggtataccccgcgaatgaagttaccttattggattccagatctgttcagggagaacttgggtggatagcaagccctctggaaggagggtgggaggaagtgagtatcatggatgaaaaaaatacaccaatccgaacctaccaagtgtgcaatgtgatggaacccagccagaataactggctacgaactgattggatcacccgagaaggggctcagagggtgtatattgagattaaattcaccttgagggactgcaatagtcttccgggcgtcatggggacttgcaaggagacgtttaacctgtactactatgaatcagacaacgacaaagagcgtttcatcagagagaaccagtttgtcaaaattgacaccattgctgctgatgagagcttcacccaagtggacattggtgacagaatcatgaagctgaacaccgagatccgggatgtagggccattaagcaaaaaggggttttacctggcttttcaggatgtgggggcctgcatcgccctggtatcagtccgtgtgttctataaaaagtgtccactcacagtccgcaatctggcccagtttcctgacaccatcacaggggctgatacgtcttccctggtggaagttcgaggctcctgtgtcaacaactcagaagagaaagatgtgccaaaaatgtactgtggggcagatggtgaatggctggtacccattggcaactgcctatgcaacgctgggcatgaggagcggagcggagaatgccaagcttgcaaaattggatattacaaggctctctccacggatgccacctgtgccaagtgcccaccccacagctactctgtctgggaaggagccacctcgtgcacctgtgaccgaggctttttcagagctgacaacgatgctgcctctatgccctgcacccgtccaccatctgctcccctgaacttgatttcaaatgtcaacgagacatctgtgaacttggaatggagtagccctcagaatacaggtggccgccaggacatttcctataatgtggtatgcaagaaatgtggagctggtgaccccagcaagtgccgaccctgtggaagtggggtccactacaccccacagcagaatggcttgaagaccaccaaagtctccatcactgacctcctagctcataccaattacacctttgaaatctgggctgtgaatggagtgtccaaatataaccctaacccagaccaatcagtttctgtcactgtgaccaccaaccaagcagcaccatcatccattgctttggtccaggctaaagaagtcacaagatacagtgtggcactggcttggctggaaccagatcggcccaatggggtaatcctggaatatgaagtcaagtattatgagaaggatcagaatgagcgaagctatcgtatagttcggacagctgccaggaacacagatatcaaaggcctgaaccctctcacttcctatgttttccacgtgcgagccaggacagcagctggctatggagacttcagtgagcccttggaggttacaaccaacacagtgccttcccggatcattggagatggggctaactccacagtccttctggtctctgtctcgggcagtgtggtgctggtggtaattctcattgcagcttttgtcatcagccggagacggagtaaatacagtaaagccaaacaagaagcggatgaagagaaacatttgaatcaaggtgtaagaacatatgtggacccctttacgtacgaagatcccaaccaagcagtgcgagagtttgccaaagaaattgacgcatcctgcattaagattgaaaaagttataggagttggtgaatttggtgaggtatgcagtgggcgtctcaaagtgcctggcaagagagagatctgtgtggctatcaagactctgaaagctggttatacagacaaacagaggagagacttcctgagtgaggccagcatcatgggacagtttgaccatccgaacatcattcacttggaaggcgtggtcactaaatgtaaaccagtaatgatcataacagagtacatggagaatggctccttggatgcattcctcaggaaaaatgatggcagatttacagtcattcagctggtgggcatgcttcgtggcattgggtctgggatgaagtatttatctgatatgagctatgtgcatcgtgatctggccgcacggaacatcctggtgaacagcaacttggtctgcaaagtgtctgattttggcatgtcccgagtgcttgaggatgatccggaagcagcttacaccaccaggggtggcaagattcctatccggtggactgcgccagaagcaattgcctatcgtaaattcacatcagcaagtgatgtatggagctatggaatcgttatgtgggaagtgatgtcgtacggggagaggccctattgggatatgtccaatcaagatgtgattaaagccattgaggaaggctatcggttaccccctccaatggactgccccattgcgctccaccagctgatgctagactgctggcagaaggagaggagcgacaggcctaaatttgggcagattgtcaacatgttggacaaactcatccgcaaccccaacagcttgaagaggacagggacggagagctccagacctaacactgccttgttggatccaagctcccctgaattctctgctgtggtatcagtgggcgattggctccaggccattaaaatggaccggtataaggataacttcacagctgctggttataccacactagaggctgtggtgcacgtgaaccaggaggacctggcaagaattggtatcacagccatcacgcaccagaataagattttgagcagtgtccaggcaatgcgaacccaaatgcagcagatgcacggcagaatggttcccgtctgagccagtactgaataaactcaaaactcttgaaattagtttacctcatccatgcactttaattgaagaactgcactttttttacttcgtcttcgccctctgaaattaaagaaatg

SEQ ID NO: 4156 - DNA, 993 bp, Homo sapiens
atgatcaccctgaacaatcaagatcaacctgtcacttttaacagctcacatccagatgaatacaaaattgcagcccttgtcttctatagctgtatcttcataattggattatttgttaacatcactgcattatgggttttcagttgtaccaccaagaagagaaccacggtaaccatctatatgatgaatgtggcattagtggacttgatatttataatgactttaccctttcgaatgttttattatgcaaaagatgcatggccatttggagagtacttctgccagattattggagctctcacagtgttttacccaagcattgctttatggcttcttgcctttattagtgctgacagatacatggccattgtacagccgaagtacgccaaagaacttaaaaacacgtgcaaagccgtgctggcgtgtgtgggagtctggataatgaccctgaccacgaccacccctctgctactgctctataaagacccagataaagactccactcccgccacctgcctcaagatttctgacatcatctatctaaaagctgtgaacgtgctgaacctcactcgactgacattttttttcttgattcctttgttcatcatgattgggtgctacttggtcattattcataatctccttcacggcaggacgtctaagctgaaacccaaagtcaaggagaagtccataaggatcatcatcacgctgctggtgcaggtgctcgtctgctttatgcccttccacatctgtttcgctttcctgatgctgggaacgggggagaacagttacaatccctggggagcctttaccaccttcctcatgaacctcagcacgtgtctggatgtgattctctactacatcgtttcaaaacaatttcaggctcgagtcattagtgtcatgctataccgtaattaccttcgaagcctgcgcagaaaaagtttccgatctggtagtctaaggtcactaagcaatataaacagtgaaatgtta

SEQ ID NO: 4157 - DNA, 1092 bp, Homo sapiens
gaattcggcacgagtggaaacgcagagcgccggggcagaggagggctttacccaggtcacccgcaagggtggccgacgggcgaagaaacgacaggctgaacagctgtccgcagcaggagagggcggggatgcgggccgcatggacacagaggaggccaggccggcgaagaggcccgtcttcccacccctctgtggggacgggctcctgagtgggaaagaagaaacaaggaaaattccagtcccagctaacagatacacaccattgaaagaaaactggatgaagatatttactcctattgtggaacatttgggacttcagatacgctttaacttggaaatcaaggaatgtgaaatcaggacttgtaagaaccaaggatgttagtgctctgacaaaagcagtgatttgtgaaagcttttattctcggctttcaggtggaggatgcacttgccctcatcaggttggatgacctcttcctagagtcttttgaaattacagatgttaaacccctaaagggagaccatctatccagggcaataggaagaatcgctggcaaaggaggaaaaaccaaattcaccatagagaatgtgacacggacaaggatagttttggctgatgtgaaagttcacatccttggctccttccaaaatatcaagatggcaagaactgccatttgcaacctaatcttgggaaatcctccttccaaggtttatggcaatattcgagctgtggctagcagatcagcagatcgattctgatttcaagtcagagactttttatcttgcctttggactctggtgaaaaatactttacagtggtcggtcacaagaaaccatctgaacaatttcagtcatttgaagctccgtcccttcttccattctcagccagaagcataaacagaaaagaaagatttagaggattcacactcaacaggttttaggatatttatatcaaaaattgattgttatcttacacattaggtataatttatcatttatctgaaatcacatgtagcagattgcatagtcttgtaatcctctcagagggaaacttcttgtctaaacagctctatatggatttatcctccatattcc

SEQ ID NO: 4158 - DNA, 5189 bp, Homo sapiens
tgtgcgccggggaggcgccggcttgtactcggcagcgcgggaataaagtttgctgatttggtgtctagcctggatgcctgggttgcagccctgcttgtggtggcgctccacagtcatccggctgaagaagacctgttggactggatcttctcgggttttctttcagatattgttttgtatttacccatgaagacattgttttttggactctgcaaataggacatttcaaagatgagtgaaaaaaaattggaaacaactgcacagcagcggaaatgtcctgaatggatgaatgtgcagaataaaagatgtgctgtagaagaaagaaaggcatgtgttcggaagagtgtttttgaagatgacctccccttcttagaattcactggatccattgtgtatagttacgatgctagtgattgctctttcctgtcagaagatattagcatgagtctatcagatggggatgtggtgggatttgacatggagtggccaccattatacaatagagggaaacttggcaaagttgcactaattcagttgtgtgtttctgagagcaaatgttacttgttccacgtttcttccatgtcagtttttccccagggattaaaaatgttgcttgaaaataaagcagttaaaaaggcaggtgtaggaattgaaggagatcagtggaaacttctacgtgactttgatatcaaattgaagaattttgtggagttgacagatgttgccaataaaaagctgaaatgtacagagacctggagccttaacagtctggttaaacacctcttaggtaaacagctcctgaaagacaagtctatccgctgtagcaattggagtaaatttcctctcactgaggaccagaaactgtatgcagccactgatgcttatgctggttttattatttaccgaaatttagagattttggatgatactgtgcaaaggtttgctataaataaagaggaagaaatcctacttagcgacatgaacaaacagttgacttcaatctctgaggaagtgatggatctggctaagcatcttcctcatgctttcagtaaattggaaaacccacggagggtttctatcttactaaaggatatttcagaaaatctatattcactgaggaggatgataattgggtctactaacattgagactgaactgaggcccagcaataatttaaacttattatcctttgaagattcaactactgggggagtacaacagaaacaaattagagaacatgaagttttaattcacgttgaagatgaaacatgggacccaacacttgatcatttagctaaacatgatggagaagatgtacttggaaataaagtggaacgaaaagaagatggatttgaagatggagtagaagacaacaaattgaaagagaatatggaaagagcttgtttgatgtcgttagatattacagaacatgaactccaaattttggaacagcagtctcaggaagaatatcttagtgatattgcttataaatctactgagcatttatctcccaatgataatgaaaacgatacgtcctatgtaattgagagtgatgaagatttagaaatggagatgcttaagcatttatctcccaatgataatgaaaacgatacgtcctatgtaattgagagtgatgaagatttagaaatggagatgcttaagtctttagaaaacctcaatagtggcacggtagaaccaactcattctaaatgcttaaaaatggaaagaaatctgggtcttcctactaaagaagaagaagaagatgatgaaaatgaagctaatgaaggggaagaagatgatgataaggactttttgtggccagcacccaatgaagagcaagttacttgcctcaagatgtactttggccattccagttttaaaccagttcagtggaaagtgattcattcagtattagaagaaagaagagataatgttgctgtcatggcaactggatatggaaagagtttgtgcttccagtatccacctgtttatgtaggcaagattggccttgttatctctccccttatttctctgatggaagaccaagtgctacagcttaaaatgtccaacatcccagcttgcttccttggatcagcacagtcagaaaatgttctaacagatattaaattaggtaaataccggattgtatacgtaactccagaatactgttcaggtaacatgggcctgctccagcaacttgaggctgatattggtatcacgctcattgctgtggatgaggctcactgtatttctgagtgggggcatgattttagggattcattcaggaagttgggctccctaaagacagcactgccaatggttccaatcgttgcacttactgctactgcaagttcttcaatccgggaagacattgtacgttgcttaaatctgagaaatcctcagatcacctgtactggttttgatcgaccaaacctgtatttagaagttaggcgaaaaacagggaatatccttcaggatctgcagccatttcttgtcaaaacaagttcccactgggaatttgaaggtccaacaatcatctactgtccttctagaaaaatgacacaacaagttacaggtgaacttaggaaacttaatctatcctgtggaacataccatgcgggcatgagttttagcacaaggaaagacattcatcataggtttgtaagagatgaaattcagtgtgtcatagctaccatagcttttggaatgggcattaataaagctgacattcgccaagtcattcattacggtgctcctaaggacatggaatcatattatcaggagattggtagagctggtcgtgatggacttcaaagttcttgtcacgtcctctgggctcctgcagacattaacttaaataggcaccttcttactgagatacgtaatgagaagtttcgattatacaaattaaagatgatggcaaagatggaaaaatatcttcattctagcagatgtaggagacaaatcatcttgtctcattttgaggacaaacaagtacaaaaagcctccttgggaattatgggaactgaaaaatgctgtgataattgcaggtccagattggatcattgctattccatggatgactcagaggatacatcctgggactttggtccacaagcatttaagcttttgtctgctgtggacatcttaggcgaaaaatttggaattgggcttccaattttatttctccgaggatctaattctcagcgtcttgccgatcaatatcgcaggcacagtttatttggcactggcaaggatcaaacagagagttggtggaaggctttttcccgtcagctgatcactgagggattcttggtagaagtttctcggtataacaaatttatgaagatttgcgcccttacgaaaaagggtagaaattggcttcataaagctaatacagaatctcagagcctcatccttcaagctaatgaagaattgtgtccaaagaagtttcttctgcctagttcgaaaactgtatcttcgggcaccaaagagcattgttataatcaagtaccagttgaattaagtacagagaagaagtctaacttggagaagttatattcttataaaccatgtgataagatttcttctgggagtaacatttctaaaaaaagtatcatggtacagtcaccagaaaaagcttacagttcctcacagcctgttatttcggcacaagagcaggagactcagattgtgttatatggcaaattggtagaagctaggcagaaacatgccaataaaatggatgttcccccagctattctggcaacaaacaagatactggtggatatggccaaaatgagaccaactacggttgaaaacgtaaaaaggattgatggtgtttctgaaggcaaagctgccatgttggcccctctgttggaagtcatcaaacatttctgccaaacaaatagtgttcagacagacctcttttcaagtacaaaacctcaagaagaacagaagacgagtctggtagcaaaaaataaaatatgcacactttcacagtctatggccatcacatactctttattccaagaaaagaagatgcctttgaagagcatagctgagagcaggattctgcctctcatgacaattggcatgcacttatcccaagcggtgaaagctggctgcccccttgatttggagcgagcaggcctgactccagaggttcagaagattattgctgatgttatccgaaaccctcccgtcaactcagatatgagtaaaattagcctaatcagaatgttagttcctgaaaacattgacacgtaccttatccacatggcaattgagatccttaaacatggtcctgacagcggacttcaaccttcatgtgatgtcaacaaaaggagatgttttcccggttctgaagagatctgttcaagttctaagagaagcaaggaagaagtaggcatcaatactgagacttcatctgcagagagaaagagacgattacctgtgtggtttgccaaaggaagtgataccagcaagaaattaatggacaaaacgaaaaggggaggtctttttagttaagctggcaattaccagaacaattatgtttcttgctgtattataagaggatagctatattttatttctgaagagtaaggagtagtattttggcttaaaaatcattctaattacaaagttcactgtttattgaagaactggcatcttaaatcagccttccgcaattcatgtagtttctgggtcttctgggagcctacgtgagtacatcacctaacagaatattaaattagacttcctgtaagattgctttaagaaactgttactgtcctgttttctaatctctttattaaaacagtgtatttggaaaatgttatgtgctctgatttgatatagataacagattagtagttacatggtaattatgtgatataaaatattcatatattatcaaaattctgttttgtaaatgtaagaaagcatagttattttacaaattgtttttactgtcttttgaagaagttcttaaatacgttgttaaatggtattagttgaccagggcagtgaaaatgaaaccgcattttgggtgccattaaatagggaaaaaacatgtaaaaaatgtaaaatggagaccaattgcactaggcaagtgtatattttgtattttatatacaatttctattatttttcaagtaataaaacaatgtttttcatactgaatatta

SEQ ID NO: 4159 - DNA, 13500 bp, Homo sapiens; identical to SEQ ID NO: 1212
  misc_feature (1)..(13500): n=a,t,g or c

SEQ ID NO: 4160 - DNA, 1452 bp, Homo sapiens; identical to SEQ ID NO: 1008

SEQ ID NO: 4161 - DNA, 2351 bp, Homo sapiens
gcgcggcggcggacctcgggttgccctcggtccgagtgatccctggtcgcttccttagccctcccgccttcggcattggggtccccgcgtcccccgggcctccaggcgggaaagcgcgggggctttgcggggccttgagcgcctggtgtgggaggtggtcgagcccagccaccctcccccgcggcggcgcgaggtctctcggccagaacacgtggatgcccacccaccactgagcctcatggaggtggtaacatttggcgatgtggctgtgcacttctctcgggaggagtggcagtgtctggaccctggccagagggccctctacagggaagtgatgctggagaaccacagcagtgtggctggactagcaggattcctggttttcaagcctgagctgatctctcggctggagcagggagaagagccatgggtcctcgacctgcagggagcagaggggacagaggcaccaaggacctccaagacagattctacgattaggactgaaaatgagcaggcctgtgaggacatggacatcctaaaatcagaatcctatgggacagtggtcagaatctccccacaggactttcctcagaatcctggctttggagacgtttctgattctgaggtctggttagacagtcatctgggcagtcccgggctgaaagtgacaggctttaccttccaaaataactgtttgaatgaggagactgtggttcccaagaccttcaccaaggacgcaccccagggatgtaaggagctgggaagcagcggcctggattgtcagcctcttgaaagtcagggagagagtgcggaagggatgtcccagagatgcgaggagtgtggcaaaggcatcagagccacttcagatatcgctctgcattgggaaattaatacacagaaaattagcagatgtcaagaatgccaaaaaaagttatctgactgcttgcaggggaaacatacaaataactgccatggagagaagccgtacgaatgtgcagagtgtgggaaagtcttcaggctctgctcgcagcttaatcagcatcagagaatccacacgggagagaaaccctttaaatgcactgagtgtggaaaagccttccgcctgagctcaaaacttattcagcatcaaagaatccacactggggagaagccctacagatgtgaggaatgtggaaaagcttttggtcagagctcaagcctcatccaccatcagagaatccacacaggagagaggccctatggttgtcgtgagtgtgggaaagccttcagccagcagtcgcagctggttagacaccagagaactcacactggggagaggccctacccttgcaaggagtgtgggaaggccttcagccagagctccaccctagcccagcatcaaaggatgcatactggggagaaagctcaaattctaaaagcctcagacagtccaagccttgttgcacatcagagaattcacgctgtagagaaaccatttaagtgtgatgagtgtgggaaagcttttaggtggatctctcgcctgagtcagcatcagctgattcacactggagagaagccttataaatgcaacaagtgtacaaaagcctttggttgtagttcacggcttattcgccatcagagaactcacactggagaaaaaccatttaaatgtgatgagtgtggcaaaggctttgttcagggctcacaccttattcagcatcagcgaatccacactggagagaaaccctatgtgtgtaatgactgtggaaaagccttcagtcagagttccagccttatttaccatcagagaatccataaaggagagaagccctacgaatgcctccaatgcggaaaagccttcagtatgagcacacagcttacaatacatcaaagggttcacactggagagaggccctataaatgtaatgaatgtgggaaagccttcagtcaaaactcaacccttttccaacaccagataattcatgcaggggtgaagccctatgagtgcagtgagtgtggaaaagccttcagccggagctcatatcttattgaacaccagagaatacacactagggcccagtggttttacgaatatgggaatgccctggaagggtccacctttgtgagccgtaaaaaggttaatactataaagaaactgcatcagtgtgaagactgtgagaagatatttaggtggcgttcacacctaattatacaccagagaattcacaccggggagaagccttataaatgcaatgactgtggcaaagcttttaatcgtagctcaaggcttacccagcatcaaaaaattcacatgggatagaccacttacatataaatgtgtatatatgtgaataaacctatagccttaactt

SEQ ID NO: 4162 - DNA, 1523 bp, Homo sapiens
gggtcgatgggggagatggagcaactgcgtcaggaagcggagcagctcaagaagcagattgcagatgccaggaaagcctgtgctgacgttactctggcagagctggtgtctggcctagaggtggtgggacgagtccagatgcggacgcggcggacgttaaggggacacctggccaagatttacgccatgcactgggccactgattctaagctgctggtaagtgcctcgcaagatgggaagctgatcgtgtgggacagctacaccaccaacaaggtgcacgccatcccactgcgctcctcctgggtcatgacctgtgcctatgccccatcagggaactttgtggcatgtggggggctggacaacatgtgttccatctacaacctcaaatcccgtgagggcaatgtcaaggtcagccgggagctttctgctcacacaggttatctctcctgctgccgcttcctggatgacaacaatattgtgaccagctcgggggacaccacgtgtgccttgtgggacattgagactgggcagcagaagactgtatttgtgggacacacgggtgactgcatgagcctggctgtgtctcctgacttcaatctcttcatttcgggggcctgtgatgccagtgccaagctctgggatgtgcgagaggggacctgccgtcagactttcactggccacgagtcggacatcaacgccatctgtttcttccccaatggagaggccatctgcacgggctcggatgacgcttcctgccgcttgtttgacctgcgggcagaccaggagctgatctgcttctcccacgagagcatcatctgcggcatcacgtccgtggccttctccctcagtggccgcctactattcgctggctacgacgacttcaactgcaatgtctgggactccatgaagtctgagcgtgtgggcatcctctctggccacgataacagggtgagctgcctgggagtcacagctgacgggatggctgtggccacaggttcctgggacagcttcctcaaaatctggaactgaggaggctggagaaagggaagtggaaggcagtgaacacactcagcagccccctgcccgaccccatctcattcaggtgttctcttctatattccgggtgccattcccactaagctttctcctttgagggcagtggggagcatgggactgtgcctttgggaggcagcatcagggacacaggggcaaagaactgccccatctcctcccatggccttccctccccacagtcctcacagcctctcccttaatgagcaaggacaacctgcccctccccagccctttgcaggcccagcagacttgagtctgaggccccaggccctaggattcctcccccagagccactacctttgtccaggcctgggtggtatagggcgtttggccctgtgactatggctctggcaccactagggtcctggccctcttcttattcatgctttctcctttttctacctttttttctctcctaagacacctgcaataaagtgtagcaccctggt

SEQ ID NO: 4163 - DNA, 1531 bp, Homo sapiens
agtcacagagggaacacagagcctagttgtaaacggacagagacgagaggggcaagggaggacagtggatgacagggaagacgagtgggggcagagctgctcaggaccatggctgaggccatcacctatgcagatctgaggtttgtgaaggctcccctgaagaagagcatctccagccggttaggacaggacccaggggctgatgatgatggggaaatcacctacgagaatgttcaagtgcccgcagtcctaggggtgccctcaagcttggcttcttctgtactaggggacaaagcagcggtcaagtcggagcagccaactgcgtcctggagagccgtgacgtcaccagctgtcgggcggattctcccctgccgcacaacctgcctgcgatacctcctgctcggcctgctcctcacctgcctgctgttaggagtgaccgccatctgcctgggagtgcgctatctgcaggtgtctcagcagctccagcagacgaacagggttctggaagtcactaacagcagcctgaggcagcagctccgcctcaagataacgcagctgggacagagtgcagaggatctgcaggggtccaggagagagctggcgcagagtcaggaagcactacaggtggaacagagggctcatcaggcggccgaagggcagctacaggcctgccaggcagacagacagaagacgaaggagaccttgcaaagtgaggagcaacagaggagggccttggagcagaagctgagcaacatggagaacagactgaagcccttcttcacatgcggctcagcagacacctgctgtccgtcgggatggataatgcatcagaaaagctgcttttacatctcacttacttcaaaaaattggcaggagagccaaaaacaatgtgaaactctgtcttccaagctggccacattcagtgaaatttatccacaatcacactcttactacttcttaaattcactgttgccaaatggtggttcagggaattcatattggactggcctcagctctaacaaggattggaagttgactgatgatacacaacgcactaggacttatgctcaaagctcaaaatgtaacaaggtacataaaacttggtcatggtggacactggagtcagagtcatgtagaagttctcttccctacatctgtgagatgacagctttcaggtttccagattaggacagtcctttgcactgagttgacactcatgccaacaagaacctgtgcccctccttcctaacctgaggcctggggttcctcagaccatctccttcattctgggcagtgccagccaccggctgacccacacctgacacttccagccagtctgctgcctgctccctcttcctgaaactggactgttcctgggaaaagggtgaagccacctctagaagggactttggcctccccccaagaacttcccatggtagaatggggtgggggaggagggcgcacgggctgagcggataggggcggcccggagccagccaggcagttttattgaaatctttttaaataattg

SEQ ID NO: 4164 - DNA, 2346 bp, Homo sapiens
gcacgaggctgcggcgggtccgggcccatgaggcgacgaaggaggcgggacggcttttacccagccccggacttccgagacagggaagctgaggacatggcaggagtgtttgacatagacctggaccagccagaggacgcgggctctgaggatgagctggaggaggggggtcagttaaatgaaagcatggaccatgggggagttggaccatatgaacttggcatggaacattgtgagaaatttgaaatctcagaaactagtgtgaacagagggccagaaaaaatcagaccagaatgttttgagctacttcgggtacttggtaaagggggctatggaaaggtttttcaagtacgaaaagtaacaggagcaaatactgggaaaatatttgccatgaaggtgcttaaaaaggcaatgatagtaagaaatgctaaagatacagctcatacaaaagcagaacggaatattctggaggaagtaaagcatcccttcatcgtggatttaatttatgcctttcagactggtggaaaactctacctcatccttgagtatctcagtggaggagaactatttatgcagttagaaagagagggaatatttatggaagacactgcctgcttttacttggcagaaatctccatggctttggggcatttacatcaaaaggggatcatctacagagacctgaagccggagaatatcatgcttaatcaccaaggtcatgtgaaactaacagactttggactatgcaaagaatctattcatgatggaacagtcacacacacattttgtggaacaatagaatacatggcccctgaaatcttgatgagaagtggccacaatcgtgctgtggattggtggagtttgggagcattaatgtatgacatgctgactggagcacccccattcactggggagaatagaaagaaaacaattgacaaaatcctcaaatgtaaactcaatttgcctccctacctcacacaagaagccagagatctgcttaaaaagctgctgaaaagaaatgctgcttctcgtctgggagctggtcctggggacgctggagaagttcaagctcatccattctttagacacattaactgggaagaacttctggctcgaaaggtggagcccccctttaaacctctgttgcaatctgaagaggatgtaagtcagtttgattccaagtttacacgtcagacacctgtcgacagcccagatgactcaactctcagtgaaagtgccaatcaggtctttctgggttttacatatgtggctccatctgtacttgaaagtgtgaaagaaaagttttcctttgaaccaaaaatccgatcacctcgaagatttattggcagcccacgaacacctgtcagcccagtcaaattttctcctggggatttctggggaagaggtgcttcggccagcacagcaaatcctcagacacctgtggaatacccaatggaaacaagtggcatagagcagatggatgtgacaatgagtggggaagcatcggcaccacttccaatacgacagccgaactctgggccatacaaaaaacaagcttttcccatgatctccaaacggccagagcacctgcgtatgaatctatgacagagcaatgcttttaatgaatttaaggcaaaaaggtggagagggagatgtgtgagcatcctgcaaggtgaaacaagactcaaaatgacagtttcagagagtcaatgtcattacatagaacacttcggacacaggaaaaataaacgtggattttaaaaaatcaatcaatggtgcaaaaaaaaacttaaagcaaaatagtattgctgaactcttaggcacatcaattaattgattcctcgcgacatctttctcaaccttatcaaggattttcatgttgatgactcgaaactgacagtattaagggtaggatgttgctctgaatcactgtgagtctgatgtgtgaagaagggtatcctttcattaggcaagtacaaattgcctataatacttgcaactaaggacaaattagcatgcaagcttggtcaaacttttcccaggcaaaatgggaaggcaaagacaaaagaaacttaccaattgatgttttacgtgcaaacaacctgaatcttttttttatataaatatatatttttcaaatagatttttgattcagctcattatgaaaaacatcccaaactttaaaatgcgaaattattggttggtgtgaagaaagccagacaacttctgtttcttctcttggtgaaataataaaatgcaaatgaatcattgttaacacagctgtggctcgtttgagggattggggtggacctggggtttattttcagtaacccagctgcggagcct

SEQ ID NO: 4165 - DNA, 1936 bp, Homo sapiens
cctcgctagtggcgggcatgataacacacgccggagggtcgcacgcgggttccagttgtgattgctggagttgtgtattgccaggaggctctccgagattggggtcgggtcactgcctcatccaccggagcgatggcgtttctccgaagcatgtggggcgtgctgagtgccctgggaaggtctggagcagagctgtgcaccggctgtggaagtcgactgcgctcccccttcagttttgtgtatttaccgaggtggttttcatctgtcttggcaagttgtccaaagaaacctgtaagttcttaccttcgattttctaaagaacaactacccatatttaaagctcagaacccagatgcaaaaactacagaactaattagaagaattgcccagcgttggagggaacttcctgattcaaagaaaaaaatatatcaagatgcttatagggcggagtggcaggtatataaagaagagataagcagatttaaagaacagctaactccaagtcagattatgtctttggaaaaagaaatcatggacaaacatttaaaaaggaaagctatgacaaaaaaaaaagagttaacactgcttggaaaaccaaaaagacctcgttcagcttataacgtttatgtagctgaaagattccaagaagctaagggtgattcaccgcaggaaaagctgaagactgtaaaggaaaactggaaaaatctgtctgactctgaaaaggaattatatattcagcatgctaaagaggacgaaactcgttatcataatgaaatgaagtcttgggaagaacaaatgattgaagttggacgaaaggatcttctacgtcgcacaataaagaaacaacgaaaatatggtgctgaggagtgttaaaagtagaagattgagatgtgttcacaatggataggcacaggaaaccagttaggtctcaatacctgaagctatcgtaaaattaagaaaggataaagttggtaaaccttttatatttagtatctttttattcagctcatggacttctgccagcataatacttgctttggaaaacccagataaaggttcatgcaaactttattttgtgtttaggaactactgaggatcagagtaatccaagcaaatgtgaatcattttacctttgacaaaggtaaatcagactatgaagttttttttatacaggatgatgactatggaaagagtactcttgtttccttatattatggaggcaggagtttcgttttcaaaattgttacaaattgtagaagccacggtgttctgtgatataagtgtgtgtttttcataaagcaggcagaactcatctaggtaaattacagttcctaggtataattcacattgtattcagagttgatggttgtacatataagtgattgctggttttagttgcaactttgtataaaagggactgagaaatttataaacttttttcttactgtcttttttctaaagtaaaaacaaagaaattatgtgccagatttatgcatattattttatgttgcatagaataaaatttttaatctttaattttacatttcctaaatatattttaagacgaaacatttgttctatagcttttccctttttttaagtaaggaattttatttttttctgaattattttctctcgtgagtatattgatccagaaagaaaacttgtattatgtgtgttttaaaatgagaaatctaaaaaacgaaaagtctccaaagtctctggaatttgaaacactttgcataacgtataaaagcctgtttaagagacagccaactatggcctgtggatcaaatccagcctgctgcctgctttttatggcctgtgagctaggaattgtgtttataattttaaatgtttttttttaaagacttttatgatacttgaaaattaacatgaatatttagtgttcataaataaagtttgttgaaacaca

SEQ ID NO: 4166 - DNA, 1764 bp, Homo sapiens; identical to SEQ ID NO: 3725

SEQ ID NO: 4167 - DNA, 865 bp, Homo sapiens
gaattccggagttccgggcgcgcgcgacgtcagtttgagttctgtgttctccccgcccgtgtcccgcccgacccgcgcccgcgatgctggcgctgcgctgcggctcccgctggctcggcctgctctccgtcccgcgctccgtgccgctgcgcctccccgcggcccgcgcctgcagcaagggctccggcgacccgtcctcttcctcctcctccgggaacccgctcgtgtacctggacgtggacgccaacgggaagccgctcggccgcgtggtgctggagctgaaggcagatgtcgtcccaaagacagctgagaacttcagagccctgtgcactggtgagaagggcttcggctacaaaggctccaccttccacagggtgatcccttccttcatgtgccaggcgggcgacttcaccaaccacaatggcacaggcgggaagtccatctacggaagccgctttcctgacgagaactttacactgaagcacgtggggccaggtgtcctgtccatggctaatgctggtcctaacaccaacggctcccagttcttcatctgcaccataaagacagactggttggatggcaagcatgttgtgttcggtcacgtcaaagagggcatggacgtcgtgaagaaaatagaatctttcggctctaagagtgggaggacatccaagaagattgtcatcacagactgtggccagttgagctaatctgtggccagggtgctggcatggtggcagctgcaaatgtccatgcacccaggtggccgcgttgggctgtcagccaaggtgcctgaaacgatacgtgtgcccactccactgtcacagtgtgcctgaggaaggctgctagggatgttagacggaattcc

SEQ ID NO: 4168 - DNA, 1332 bp, Homo sapiens
cggactagacctggtcagacacaatgttggcactcttggttctggtgactgtggccctggcatctgctcatcatggtggtgagcactttgaaggcgagaaggtgttccgtgttaacgttgaagatgaaaatcacattaacataatccgcgagttggccagcacgacccagattgacttctggaagccagattctgtcacacaaatcaaacctcacagtacagttgacttccgtgttaaagcagaagatactgtcactgtggagaatgttctaaagcagaatgaactacaatacaaggtactgataagcaacctgagaaatgtggtggaggctcagtttgatagccgggttcgtgcaacaggacacagttatgagaagtacaacaagtgggaaacgatagaggcttggactcaacaagtcgccactgagaatccagccctcatctctcgcagtgttatcggaaccacatttgagggacgcgctatttacctcctgaaggttggcaaagctggacaaaataagcctgccattttcatggactgtggtttccatgccagagagtggatttctcctgcattctgccagtggtttgtaagagaggctgttcgtacctatggacgtgagatccaagtgacagagcttctcgacaagttagacttttatgtcctgcctgtgctcaatattgatggctacatctacacctggaccaagagccgattttggagaaagactcgctccacccatactggatctagcattggcacagaccccaacagaaattttgatgctggttggtgtgaaattggagcctctcgaaacccctgtgatgaaacttactgtggacctgccgcagagtctgaaaaggagaccaaggccctggctgatttcatccgcaacaaactctcttccatcaaggcatatctgacaatccactcgtactcccaaatgatgatctacccttactcatatgcttacaaactcggtgagaacaatgctgagttgaatgccctggctaaagctactgtgaaagaacttgcctcactgcacggcaccaagtacacatatggcccgggagctacaacaatctatcctgctgctgggggctctgacgactgggcttatgaccaaggaatcagatattccttcacctttgaacttcgagatacaggcagatatggctttctccttccagaatcccagatccgggctacctgcgaggagaccttcctggcaatcaagtatgttgccagctacgtcctggaacacctgtactagttgagaaagctgatggccttgtttcaaaattctcatttttcatttcttttctttcttg

SEQ ID NO: 4169 - DNA, 890 bp, Homo sapiens
ggcggaccgaagaacgcaggaagggggccggggggacccgcccccggccggccgcagccatgaactccaacgtggagaacctacccccgcacatcatccgcctggtgtacaaggaggtgacgacactgaccgcagacccacccgatggcatcaaggtctttcccaacgaggaggacctcaccgacctccaggtcaccatcgagggccctgaggggaccccatatgctggaggtctgttccgcatgaaactcctgctggggaaggacttccctgcctccccacccaagggctacttcctgaccaagatcttccacccgaacgtgggcgccaatggcgagatctgcgtcaacgtgctcaagagggactggacggctgagctgggcatccgacacgtactgctgaccatcaagtgcctgctgatccaccctaaccccgagtctgcactcaacgaggaggcgggccgcctgctcttggagaactacgaggagtatgcggctcgggcccgtctgctcacagagatccacgggggcgccggcgggcccagcggcagggccgaagccggtcgggccctggccagtggcactgaagcttcctccaccgaccctggggccccagggggcccgggaggggctgagggtcccatggccaagaagcatgctggcgagcgcgataagaagctggcggccaagaaaaagacggacaagaagcgggcgctgcgggcgctgcggcggctgtagtgggctctcttcctccttccaccgtgaccccaacctctcctgtcccctccctccaactctgtctctaagttatttaaattatggctggggtcggggagggtacagggggcactgggacctggatttgtttttctaaataaagttggaaaagca

SEQ ID NO: 4170 - DNA, 2838 bp, Homo sapiens; identical to SEQ ID NO: 3727

SEQ ID NO: 4171 - DNA, 1717 bp, Homo sapiens; identical to SEQ ID NO: 452

SEQ ID NO: 4172 - DNA, 2798 bp, Homo sapiens
cgttgctgtcgctctgcacgcacctatgtggaaactaaagcccagagagaaagtctgacttgccccacagccagtgagtgactgcagcagcaccagaatctggtctgtttcctgtttggctcttctaccactacggcttgggatctcgggcatggtggctttgccaatggtccttgttttgctgctggtcctgagcagaggtgagagtgaattggacgccaagatcccatccacaggggatgccacagaatggcggaatcctcacctgtccatgctggggtcctgccagccagccccctcctgccagaagtgcatcctctcacaccccagctgtgcatggtgcaagcaactgaacttcaccgcgtcgggagaggcggaggcgcggcgctgcgcccgacgagaggagctgctggctcgaggctgcccgctggaggagctggaggagccccgcggccagcaggaggtgctgcaggaccagccgctcagccagggcgcccgcggagagggtgccacccagctggcgccgcagcgggtccgggtcacgctgcggcctggggagccccagcagctccaggtccgcttccttcgtgctgagggatacccggtggacctgtactaccttatggacctgagctactccatgaaggacgacctggaacgcgtgcgccagctcgggcacgctctgctggtccggctgcaggaagtcacccattctgtgcgcattggttttggttcctttgtggacaaaacggtgctgccctttgtgagcacagtaccctccaaactgcgccacccctgccccacccggctggagcgctgccagtcaccattcagctttcaccatgtgctgtccctgacgggggacgcacaagccttcgagcgggaggtggggcgccagagtgtgtccggcaatctggactcgcctgaaggtggcttcgatgccattctgcaggctgcactctgccaggagcagattggctggagaaatgtgtcccggctgctggtgttcacttcagacgacacattccatacagctggggacgggaagttgggcggcattttcatgcccagtgatgggcactgccacttggacagcaatggcctctacagtcgcagcacagagtttgactacccttctgtgggtcaggtagcccaggccctctctgcagcaaatatccagcccatctttgctgtcaccagtgccgcactgcctgtctaccaggagctgagtaaactgattcctaagtctgcagttggggagctgagtgaggactccagcaacgtggtacagctcatcatggatgcttataatagcctgtcttccaccgtgacccttgaacactcttcactccctcctggggtccacatttcttacgaatcccagtgtgagggtcctgagaagagggagggtaaggctgaggatcgaggacagtgcaaccacgtccgaatcaaccagacggtgactttctgggtttctctccaagccacccactgcctcccagagccccatctcctgaggctccgggcccttggcttctcagaggagctgattgtggagttgcacacgctgtgtgactgtaattgcagtgacacccagccccaggctccccactgcagtgatggccagggacacctacaatgtggtgtatgcagctgtgcccctggccgcctaggtcggctctgtgagtgctctgtggcagagctgtcctccccagacctggaatctgggtgccgggctcccaatggcacagggcccctgtgcagtggaaagggtcactgtcaatgtggacgctgcagctgcagtggacagagctctgggcatctgtgcgagtgtgacgatgccagctgtgagcgacatgagggcatcctctgcggaggctttggtcgctgccaatgtggagtatgtcactgtcatgccaaccgcacgggcagagcatgcgaatgcagtggggacatggacagttgcatcagtcccgagggagggctctgcagtgggcatggacgctgcaaatgcaaccgctgccagtgcttggacggctactatggtgctctatgcgaccaatgcccaggctgcaagacaccatgcgagagacaccgggactgtgcagagtgtggggccttcaggactggcccactggccaccaactgcagtacagcttgtgcccataccaatgtgaccctggccttggcccctatcttggatgatggctggtgcaaagagcggaccctggacaaccagctgttcttcttcttggtggaggatgacgccagaggcacggtcgtgctcagagtgagaccccaagaaaagggagcagaccacacgcaggccattgtgctgggctgcgtagggggcatcgtggcagtggggctggggctggtcctggcttaccggctctcggtggaaatctatgaccgccgggaatacagtcgctttgagaaggagcagcaacaactcaactggaagcaggacagtaatcctctctacaaaagtgccatcacgaccaccatcaatcctcgctttcaagaggcagacagtcccactctctgaaggagggagggacacttacccaaggctcttctccttggaggacagtgggaactggagggtgagaggaagggtgggtctgtaagaccttggtaggggactaattcactggcgaggtgcggccaccaccctacttcattttcagagtgacacccaagagggctgcttcccatgcctgcaaccttgcatccatctgggctaccccacccaagtatacaataaagtcttacctcagaaaaaaaaaaaaaaaaaa

SEQ ID NO: 4173 - DNA, 5670 bp, Homo sapiens
cagtaaagagctgatcatggttctcactccttgaataccaggaacaccatctcgtatcacataatgagacagggagacattctggtcctcatctcacagatgaaaaatgtcaagcttcgaaggatcaaagtgcccacctagtcacacgggtagtcagccacaggtcagcctgccttatttattcttcatgagtatttatagtgactaacatttactgggcgcctactgtgggccatttctgtgcatgtgacaacccctttaagtccttgtttctaatcccaagaagcaaggaaatggggtcagggaagggacaaggtttgcccaagtccaggcagggggagaggtcaagctcagaaccatcacctgcccatgacacatgcccaggactcaggttccctaggcttccttccaaaggctcagcagtgacgagccagcccttgaaccagcctcttcccccacccaagcagccacctctcaggggaattgtggccaccacaggtgcagggagcagtttctctccactcacagcctgaagcatacccggcaggggctgtccccaggcccaacaagcaaagggcccagtagcgagggccactggagcccatctccggggggctgggcaggaagtagggtggggtttggggtagggatctggtaccctgggactgctgcaactcaaactaaccaacccactgggagaagatgcctgggggtccaggagtcctccaagctctgcctgccaccatcttcctcctcttcctgctgtctgctgtctacctgggtatgtggccaaagggcaggaactggcgggaggtgggggaagctgtggaggctgcagagagggcacaggcagagggaagggggctcagggaaaggggaagaggaggcagaggataggggacccagggaagatgcctatagaaatcgtatctgtgccaagatgggccaaggtggggctggagggagcccagcagaggagaaggggcgtccacagtctcacacagggaggcaggagcaagagtcacctcccccacctcctgttccccacaggccaaaataaggaactaaagttgctcttgactgagcaccagggctgggggcaggaaggggacttaggggtagcagcattcagcgtctgtcaaggggagaaaaagctttctctgccttaaacctcaggtgcctctctctgttgggagtcccttctcagcactgggggaatgggtgtctcatggactccccctcacctgctcaaggacagctggcaggggctgtggcacgctaacccaggagttcagagaaaaaggttccccacccaagggacactgggagcaaggattggagttcacgtctgagtcttaagcccgtgacgatgagggtgctcggcccctctccccatctcttcctccttctctcttcctcacctccctcctccacctacctccagaagaggggactggccatgtgggaggcctggctgagagctggggcttcccagaggagcccggattggacactgcagccagcctgagccgcctcgtctcactcagagacacccccagtctccaccccgctctgagccccttcaatcaccagcagcccagcccaaggactgaactcacccctgacccctaggttgacacatacaacttacagagaatgagggccaggcacagggtcacaggccagggcaggccacagactggctcctcagcccaggcagggagaggccagggagccaagagtttgaacccagtgccactcctgactgcctggtgatgctggcaacccgcctgccctcccagagcctcagccatccctcctgtaaaatggggctaaggagagaacctacttctagggttctgtgaatgattacacaagaaaaagcgccaggtgctgggcctggctgaggctggggtgcaaaaatggaccgggaaggctgcgggaggaggggacgcctgcactgcttctggaaggagctgtctggacagcgtcctccagtgcctggaacaaacatccaaaatccagagagttcacagggccagagtacaaagtgggtatgcgggagggggacaagagatggcgctgcagaggtgagaagggcctcccaggggtcttaccatcccagggagtctcattctcctctcccaggatatcctcacccaccccaaccaggtatgtcctctctccttcccaggggcttcttcactttcccgcatcccccctctccccaggatgtatcagcccctgtcaggggctctctctctccctccccacccaggagagtcctcaccctcttcccaggagtgctggaactgcaggggccagggctggggaaatgtgtcaccatccccagtccctgacccacccaccctgtctctccacaggccctgggtgccaggccctgtggatgcacaaggtcccagcatcattgatggtgagcctgggggaagacgcccacttccaatgcccgcacaatagcagcaacaacgccaacgtcacctggtggcgcgtcctccatggcaactacacgtggccccctgagttcttgggcccgggcgaggaccccaatggtacgctgatcatccagaatgtgaacaagagccatgggggcatatacgtgtgccgggtccaggagggcaacgagtcataccagcagtcctgcggcacctacctccgcgtgcgccgtgagtggcccagccctggcccctactcccactgtcccgctgggcactcggtttatctttgaagtggggatagagccagtaccttcaatgtgggtttcaaaccggcttggacagagggacggacattctcctctgcagagtggggtctctggggggtctggggccttgcaggaggtgggcggggcaggaggctagggagggcaagaggggccagggctctgagcatactacctccttgcagagccgccccccaggcccttcctggacatgggggagggcaccaagaaccgaatcatcacagccgaggggatcatcctcctgttctgcgcggtggtgcctgggacgctgctgctgttcagggtgagccccctcggacctctgagtcagccgggcgagggctgggcgagggacccccaatacccaggtagccctctagagcctgaggttccccatccaaaacttgggagaatgaaagcacccaccatataggggctgtgggagttaaatgaatgaatataaagaagggacttgaactggcgctgagccagggggtgtcttcaatttagtttccccttctggctgtcctcacgtccacctccccccaagaagagtctcattcttctccctaagagtgtcctcactcccctcctgccctcacccaggagtgtggttaccctccaggtgtagccaagaccagggaaggtggggcctggtcctcccagaatctctgatctgtaccagcctctccttaggcactacagaaagtgtgactgttattgttattattcatggagaatagtaagggagtggagactcaagaagacgctagcttgggaggccgaggcaagaggatcacttgaggccacaagtttgagaccagcctgggcaacacagcaagaccctatctctacacacacaaagtcttaaaaaaaaattagccaggcatggtggcacacacctatagtcccagctactcaggaggctgaggtgggaggattgcttgagcccaggagttcaaggctgcagtgaaatatgatgttgccacagcacttccagcctgggcaactgagggagaagaaagagagagagagagaaagagagagagagagagagagagagagagagggccagagggagggagggaaggaagggaagggaagggaaggaaggaaggaaggaaggaaggaaggaaggaaggaaggaaggaaggagaacactggttgtagactcagagagaactgttacataaccagtatgtggccttggggacatctcttaccctttctggaaaagtacttcctggcatccaggagggtctgaaagatattcacctccccctgctcactgaggcacccaccccacccacccctacagaaacgatggcagaacgagaagctcgggttggatgccggggatgaatatgaagatgaaaacctttatgaagtgagtgaagggtggggatggggtaggggcagttgtgttaggggtgggggtgttcctctgggggtggctgggggcagggaccccaggtgtcagggtgctgatgttcgctgcctcatttccatcccagggcctgaacctggacgactgctccatgtatgaggacatctcccggggcctccagggcacctaccaggatgtgggcagcctcaacataggagatgtccagctggagaagccgtgacacccctactcctgccaggctgcccccgcctgctgtgcacccagctccagtgtctcagctcacttccctgggacattctcctttcagcccttctgggggcttccttagtcatattcccccagtggggggtgggagggtaacctcactcttctccaggccaggcctccttggactcccctgggggtgtcccactcttcttccctctaaactgccccacctcctaacctaatccccacgccccgctgcctttcccaggctcccctcacccagcgggtaatgagcccttaatcgctgcctctaggggagctgattgtagcagcctcgttagtgtcaccccctcctccctgatctgtcagggccacttagtgataataaattcttcccaactgcagaccttggcaggagtcgtggatcttacggaaaccgcctctcccacatgtccctcagacccaggagtcccagcccaagccactccctgcccactccccacacctgggaccaggtagccagtctgggctgccctcctgggagaacaagatgtctcttgggaaggtccccagaccaactgaaggactggtttggccctctttgcagggctcaccctagggtcatatccttaagcaagaagggggacaagatcaagatggctgtggctaccaaattacttacactttttttttttttttttttttttgagacagagtctcactctgttgcccaggttggagtgctcactgcaacctctgcctcctgggttcaagcgattctcctgcctcagcctcccaagtagctgggattacaggcgcctgccaccatgcccagctaatttttgtatttttagtagaggcggggtttcaccatgttggccagactggtcttgaacctctgacctcaggtgatccacctaccttggcctcccaaagtgctgggattacaggcgcctgcaccacgcccggccgctttttttttttttttttttttttgaggcagagtctgactctgtcgcccaggctggagtgcagtggcgcaatctcagcccacttcaacctccacctcaagcgattcttgtacctcaggctcccgagtagctgggatgacaggcatgtgctaccacacccagctaatttttgttttagtagagacagggtttcgccatgttggccgggctggtctcgaactcctgacctcaagtgatccaccatgcttcggcctcccaaagtgctgggattacagcatgagccactttatgcgtatttaagccttggaaacacagggactatcttgtggattggggctagtaca

SEQ ID NO: 4174 - DNA, 1686 bp, Homo sapiens; identical to SEQ ID NO: 3730

SEQ ID NO: 4175 - DNA, 2814 bp, Homo sapiens; identical to SEQ ID NO: 499

SEQ ID NO: 4176 - DNA, 1388 bp, Homo sapiens
gcggacttctgccaagcaccggctcatgtgaggctcgcggcacagcgttctctgggctccccagaagccagcctttcgctcccggacccggcagcccgagcaggagccgtgggaccgggcgccagcaccctctgcggcgtgtcatgggcccgcgccgccggagccgaaagcccgaggccccgaggaggcgcagcccgagcccgaccccgacccccggcccctcccggcggggcccctccttaggcgcttcctcccatcaacacagtcggcggagacaaggttggctaaaggagatccgaaagcttcagaagagcacacacctcttgataaggaagctgcccttcagccgcctggcaagagaaatatgtgttaaattcactcgtggtgtggacttcaattggcaagcccaggccctattggccctacaagaggcagcagaagcatttctagttcatctctttgaggacgcctatctcctcaccttacatgcaggccgagttactctcttcccaaaggatgtgcaactggcccggaggatccggggccttgaggagggactcggctgagctcctgcacccagtgtttctgtcagtctttcctgctcagccaggggggatgataccggggactctccagagccatgactagatccaatggattctgcgatgctgtctggactttgctgtctctgaacagtatgtgtgtgttgctttaaatatttttcttttttttgagaaggagaagactgcatgactttcctctgtaacagaggtaatatatgagacaatcaacaccgttccaaaggcctgaaaataattttcagataaagagactccaaggttgactttagtttgtgagttactcatgtgactatttgaggattttgaaaacatcagatttgctgtggtatgggagaaaaggttatgtacttattattttagctctttctgtaatatttacattttttaccatatgtacatttgtacttttattttacacataagggaaaaaataagaccactttgagcagttgcctggaaggctgggcatttccatcatatagacctctgcccttcagagtagcctcaccattagtggcagcatcatgtaactgagtggactgtgcttgtcaacggatgtgtagcttttcagaaacttaattggggatgaatagaaaacctgtaagctttgatgttctggttacttctagtaaattcctgtcaaaatcaattcagaaattctaacttggagaatttaacattttactcttgtaaatcatagaagatgtatcataacagttcagaattttaaagtacattttcgatgcttttatgggtatttttgtagtttctttgtagagagataataaaaatcaaaatatttaatga

SEQ ID NO: 4177 - DNA, 18648 bp, Homo sapiens
tcaagatcagcctgggcaacatggcgaaaccccgtctctacaataaatacaaaaaaattatcctggcggagttatgcacgttgtagtcccaactacctgggaggctgaggcgggagaatcacctgagcctgggaggtcgaggctgcagcgagccgagatcggccgctgcattccagcctgggtgacagagcgagaccatgtctcaaaaaataaaaattaaaaaaaaattgttttcattacctcagccctcctcttcctatcccaaggcgtcgaaattccggtcccaccccttcccatggagcccttggcgtctccaggctcctcaagctagtttcggttccgggctcacgcgcgggttctcgaaaatcagctgtttcagtcttgggctagtccactaattggactcctcccctcgtagaaagtgcctacttgaacttctccaccaatcgctgaagctgcaggtgtggtttcggctcagcttgtcccgccctggcggaggggcggagttgcggcggcgccagtgagctcgcagtctgggaagggcttgactgaatggcagccagtgtcggggtggcggctgggaatgggggccgctccggacttccgctgccaactacaagggggcgggtccgaggggggttagccgaagttgtaggcggggcgcgaggttctagtacccgagctcatactagggacgggaagtcgcgaccagagccattggagggcgcggggactgcaaccctaatcaggtacgggccctgagagggtgtgctggggtaggggtgggggtgagagtgagagttcctccgagggaagggcgactggcccaggggttaccccctggagagggtagcttccttccccagattgaaataggagctgtcgcctgctcggtcctcgatcttcttctgtccagcctatctccctaaccctaatgcccctctcccaaaactgccctgcagcttccgagacccggaatctggcattgttatgttggttcggtatctgacgtttttccctctgctctgcattattttttatcttcaccaaaaaacgatgttcaaagatagataaatctaaaaacaaagatagataaatctattacccttgtttcgtaaaaagtataagctactgaaagatgaaacgattgcctaaggtcacacacaaaattcagttcatttcagaaaagcttcttgagtgcaaaatatgtgcctaagaatgagagataatgagaaaaaattgtttcagccccttaacctcagtgtttgcaatccatttggggagaccaggttttttgtttttgttttcatatttgaatctttgctgacttgctcctttaatatcagacacttaaatcctcagatgggactcatcatattttttttgagatggaatcttcactatgttgctcaagcttggtctgcaactcctggctcaagccatcctctcgtcttgttgggcctctcgtcttgtgggcctgcacaaagtgctgggattacaggcatgagccattcatgccctgggcgcaccttggattgcgatgtgtgtgtgttgtgaagcttttttttttggtatcataaaagcaatacagatacatagttttaaaaatcaagcagctactaaaagagttaaaatgaaaatagcccctcccaatccctcccttgttcctgctggaggtagaaaggcagctgatgttattcatgttagtagaagactctcccaccccaagcatttctctttattttgtaataaaatcatgtgacctttttagaccacaaatatgcatgaattctgttctgttaggctcaggctgcaacaagataagtttcagtttcctaaatagacaccagctggcagtgagcagggaacagtggggagaaagatgcatgggacagcctgcttggtgacaggcaaaaaccggtttgttgttcttttagagacagagtcttgctttgtcacccaggctggagtgtagtgatgtgatctctgcttactgcaaccctgcctctgggtacaagccattctcctgcctcagcctcttgagtagctgggattacaggcaacaattttaagtgaagtgaagtttcaggatctcgagcaaagttgtataacctataatcatattcaagattcacaggtcataaacgtgtcatattcttgggattgagcgacccattgcacagcatttagatgtgcttctagaatggagctcctccttcctatatggagggcagtttatatggtgtacttacctgaccaccaaaaagatttggctctaaaaaagcttcaggtggccgggcatggtggttcacccctgtaatccagcactttgggaggcaggtgggcagatcacctgaggtcagaagttcagacagctggacatatggtgaaacctcatctctactaaaaatacaaaaattagactgggcatggtagtgggcgcctgtaatcccagctagtcgggaggctgaggcaggagaatcccttcaactcggacggcagagtttgcagtgaggccgagatcgtgtcactgcagtccagcctgggtgacagagcaagactccatctcaaaaaaagtaaaaaaaaaaaaaagaaaaaaaaaagcttcagagccagcagggatcatgctgtaataaatacttaacatcaacactgatctttaaatgctttagcacaatcaaatataaataacaaacacacacataaatgcaaaataaatgaattagggagatagatgaaataagattgtggaaatagtaatgtttgttaaagctggatggtgatccttgtactattcactctactctagtgtgtatttgaaaattaccattaggctggttatggtggctcatgcctgttaatcccggcattttggaaggctgaggcaggcggattacttgagctcaggagtttagagtctgcctgggcaacatggcaaaatcccatctctacaaaaaattagctggcatgatggcacactcctgtagtcccagctccttgaggggctgaggcagagaatggcttgaacctgagaggctaaagctgcagtgagccaagatcatgccactgcactccagcctgggtgaccaagtgagaccctgtctcaaaaaaaaaaaaaaaaaaaagaaaagaaaattcccattaaagcacaaaggcccacttattgaagctattaaaatacaggttggggccggctgggcatcgcgtcacgcctgtaatcccagcactttggaaggccgaggtaggcgagtcacgagttcaggagatcgagaccatcctggctaacacggtgaaaccccatctctactaaaaatacaaaaaaaaaaatcagccgggcatggtggcgggagcctatagtcccagctactcgggaggctgaggcaggagaatggcatgagcccgggaggcggagcttgcagtgagccaaaatcacaccactgcactccagcctgggcaacagatcgagactccatctgaagaaaaaaaaaatacaggttgggaccacagtggctcatgcctgtaatcctagtactttgggagtccgaagtaggtggatcacctgaggtcaggactttgagaccagcctggccaacatggcaaaaccccatctctactaaaaaatatacaaaaattagctgggcgtggtggtgggtgcctgtaatcccagctactcaggaggctgaggcagaagaatcacaacaaccagggggatggtggttgcaatgagccaagatcatctccacttcactccggcccaggcaaaagagtgagagtcatcttaaaaaaaaaaaaaaaaaaaaaaaaaaaatacagattaggcattcctaatctgaaaaatttggctccaaaatgctccagtcgagcatttcctttgagtgtcatgtgggtgctcaaaaagttagatttttggaccattttcagatttcagagttttggattagggatgctcgactggtaagtaatcgagatattccaaaaatctggacaaatctgaaatccaaaatgcttggaatagcagatactcaactggtagcactccctggaagaatatgcaccaaactgatagcagtggttaccttctggtgaggaggggaaagaaccaagattagcagtaggatcaacatatattttaatgttttctgtatttttattacttgtataatttaaacattttaaattagtaataatgaacaatcatgaaactatggatgatttagtccagcaaaatatccaattgggaaccctcatccttctgcagagcccaaatggcgcagtgggaaatgctgcagaatcttgacagcccctttcaggatcagctgcaccagctttactcgcacagcctcctgcctgtggacattcgacagtacttggctgtctggattgaagaccagaactggtgaggccttcaggaagttgggggaatgaaaaaggtggccttccacttctgggcccccgggatcctggaatcattaatggcaggaaggggttggaaagcctcaggactacagtaacactgcagagacactaatacttcttattcctggtcccaggcaggaagctgcacttgggagtgatgattccaaggctaccatgctattcttccacttcttggatcagctgaactatgagtgtggccgttgcagccaggacccagagtccttgttgctgcagcacaatttgcggaaattctgccgggacattcaggtacttggaacggttgggagtgatggggtagcactgggagcagagcatagaggagtaaggtttggagaatagaatagtacctggaggtggcaagggagacgggaacaaatgtggggaaaggaggacagagtctggacttggggaatcactagcagagagaagggttgcatatacgtgacactgttgggaggatgctatggtgaaaagacaaagggctaagaaccccgaaggaggaggaaatactgtggacattggtggggagggtctagggcaataggtcattgagagtggttgaattggatcaatcctttctgtttacctttctgttagcccttttcccaggatcctacccagttggctgagatgatctttaacctccttctggaagaaaaaagaattttgatccaggctcagagggcccaattggtgaggacaattcagtggtaatgttggaaactcctgaagtagagaggaaccatggaaaggactcagggagttgtctcagaacaggatccccccgacatcctgtggtataatttcaggcctgaacttaaggcatgaaaggccagagttaaaacgtgctcagagcctcttttttcaggaacaaggagagccagttctcgaaacacctgtggagagccagcaacatgagattgaatcccggatcctggatttaagggctatgatggaggttagtagatgtggtaggagttagggttgacagtgttcagcctaacacctccctgagaagcagcctcatcggggtcctctcccctctgcagaagctggtaaaatccatcagccaactgaaagaccagcaggatgtcttctgcttccgatataagatccaggccaaaggtaggaagcacattgaggggctggagaaagataagtgcctgctgagaagccggagctggaagtgaacaggagaaagctccgatgagcagtagtcactgtcagacacaccccactgactacagtcctgctgccgtgcaaagctggaatcgtgctttgtggaggctgagctggaggtgacagctgagagacagtaaattgttgaggaaatgcatggaaaactaacagtgttttatttgagggggtgtctggtccaagatgaccacttcagaatttgcctggagggtcccacaggtgcctgtgctttgcttggtttccctttcttcctccgccacaaaattcctccttcctgactctgactgagaccccagtcaggaaggagaggaaagaacccctggactgactcctgttcccaccatccagggaagacaccctctctggacccccatcagaccaaagagcagaagattctgcaggaaactctcaatgaactggacaaaaggagaaaggtgggaggcagcagaacagaacatgtgggcaacaaggacctgaaaaaatgagggatgttgggaaccctggtaatctagcgctggcttctttctttcttcatccccagttgggtggtggagggtgaaagggagagatgctcaacactcacattatctctttcccaggaggtgctggatgcctccaaagcactgctaggccgattaactaccctaatcgagctactgctgccaaagttggaggagtggaaggcccagcagcaaaaagcctgcatcagagctcccattgaccacgggttggaacagctggagacatggtgagaggtaccaccccaaccctcgtcctcgccatgcgctgtgatttgtaagttgcagtgccctgcatatagcaagagatactgttctctatttgtctctgctccccagaatagagccctgctccctgcctgactgcagctctattctgcctcctcagcctcaccacgcagggaagcccagaagtcccagtctccttcagggaaaggaatgaattaacccacaatctggttttgcttcttttttttaatcacccagaaatatatatatatgtattttttttttactgcaacgaatacaatgacaagaaaggaagggaaggaaggaaggaagagaaaattacctattacctagcttattaaacaaaaatggaatcatattgtccatactattttgaaatccatggggttttttttaagcttaacagtattttatatatatatatatatatatatatatatatatatatatatatatatatatattttttttttttttttttttttttttttttgagacggagtctctctctgttccctggctggcggagcggagtcggcacgatctcagctcactgcaacttccaactcccacggttcaagccaattctcctgtctcagcctcccgagcctgggattaccaggcacacaccagcctggctagtttttttgattttttagtagagacgatgtttctccatgttggccaggctggtctcaaactcctgacttcaggtgatccacccaacttgggctcccaaagtgctgggattacaggcgtgacgaccatgcccggccaacagtatattatatttatccatgttatttcttatgtccacacaacagtcccctatatggtggtaacataatttaattaatgaactcctattttcagctatttaggttattttcaatttcttgttaccttttgccaggaaacgtatattttatggtaattatattgtgttgtagaaaaatcactagtctagtccaacttgcttgaaaaatagctactttttaactattttctcatttaaaaatttattataatttagtcttttagaaatataccaggccaggcatggcgtctcatgcctgttatcctagtactttggaaggctgaggacggaggatcacttcagtcttggggtttgagaccagcccgggaaacataacaagaccccatctctacaaaaaaaaaaaattgtttttaattaggcatgtccgacacagtggctcacacatgtggccagcactgtgggaaggccaaggtgggtggatcacttgagggtcaggagttcaagaccagcctggccaatgtggtgaaaccccatctctactaaaaatacaaaaatttgccaggtgtggtggcgcatgcctgtattcccagctactcaggaggctaaggcaggaaatcacttgaactcggaggcagaggttgcagtgagctgtgacaatgccactgtactccagcctgggtgacagagcgagctccgtctcaaaaaaaaaaaaaaaagattaggcatggtggcacacgcctgtagaccctagctactcaggaggctgaggtgggaggattgcttgagcccaggtgttggaggctgcagtgagccatgattataccactgtagtccagcctggacaacagaacgagaccctgtctctaaaagtatatatgtacacataccataatacccagctactgaggaggctgaggcagaaagagtgcttgagtccaggagtttgatgtcagcctgagcaatatagcaagaccctcacctcttaaaaaaatttaaagtagattaaaaaaataccacaattgctcaggtagattaaaaaaataccacaattgctcaggtagattattgaaaaacaggcatatagtacttatggtacaggaccagcatgcatgcatgcatgcattgattgattgattgattgattgattgagacagggtctctctctgtctcccaggctggagtgcctggccttaagtgatctgcccacctttgcttcccaaagtgctgagattacaggtgtgagccaccatgtcagctggcgaggctttttaaaagatagttccaagtgttacagctcttttaggatttgtctagcaggctttcaggtttttgccagaaaccacccccacccccaccaaaaaaaaaaaaaaaaaaaagatatgtacaagttcccagatagtgttcccaactgaatctatttctcatgtgtagtgtatggttgttttcctgtcaccacattgctgattattattatttttaattatagagacagtaaagtacagtagttaaaaatgtgagttggggctgggtgcagtggctcacacctgtaatcccagcactttgggaggccaaggtgggcggatcacctgaggtcaggagttcaagaccagcttggccaacatggcaaaaccccgtctcgactaaaaatatatatatataagttagccgggcgtggtggcaacattacctgtaatcccagctactcgggaggccaacaggcaggagaatctcttgaatccaggaggtggaggttgcagtgagccagatcacaccattgcactccagcctggatgacaagagagtgagactgtctaaaaaaaaaaaacaaagtgtgagttgtacaatgagactgcctgggatcacatacaagcttcatcccttactagttgtattgaccctaaagcaagtcactaacctttctgtgccctccagttttatcatctgtaatgtggggaaaataatagtacctgcctcagagggttgttttgaggattaaatgcattaatatgtggaaagggcttaatataagttgtacatagcatatgaaaactgttatgttaaatctattagcagttttatatgtgaaaatagctttgattttcatttcttggattatgaatcatgttgaataatcctttatatgcttcctggattctttttttttcttccccccagtcagtttctgactcttctcatatttatagagagatcttggaacctggatgggggaatccaggaaactcatggattccttcttcctgaattttatcacccaggttcacagctggagcaaagctgttgtttcacctgaggcagctgctgaaggagctgaagggactgagttgcctggttagctatcaggatgaccctctgaccaaaggggtggacctacgcaacgcccaggtcacagagttgctacagcgtctgctccacaggtctagaggccaggcaggaaccctgggggaaagaaggaacaagggaagccattcttacacatactgagctatatattctctccacacctctctctcctcgagcctttgtggtagaaacccagccctgcatgccccaaactccccatcgacccctcatcctcaagactggcagcaagttcaccgtccgaacaaggttggcattccagaactcattcccacttcctttttccaaccctgccactgtgtattttctggctttacagctactgcccactcttggctttttcagtctttcctgaatctccctacctcgttgataccccatcgtcctctttttcaaacacctagcctatacaaaagccgactccgaccacatttccctataccccttgacttccccaggctgctggtgagactccaggaaggcaatgagtcactgactgtggaagtctccattgacaggtaaattggagcaggtgaagggtggccaggacacgggctgctggggtggaggagatactcactcttcacaacagggccctagggctatatccttcctccttccaatcctacctcacagaaattataattcatttcttttgttgaacacttactttgtgacatgcagcatgtcagctactcatttaattgtcacaccaaccccatgaataaactattaccagtgcactgtacaaacaaagatacaggcttagagagactgattacatctcttctcaaggccacatagctagtgagctcaagtcgggtttgaaccgaggtctgtctgatcccaaagacgaaactcctaacttccatactcttttgcccaatgattttttttaaatttatttcttttcaggaatcctcctcaattacaagggtaggtgcttgacaaggacactgcaaacatctgtacagtgtatgacctgcagaaccgggggatttgggaaatggacaaagggagatggcgagatctgaaatggaagtggaacttcagttttttttttttctgctgagtttttacaataattccattccttgtctccatgtatcttcctcctggaacagcttccggaagttcaacattctgacttcaaaccagaaaactttgacccccgagaaggggcagagtcagggtttgatttgggactttggttacctggtaagaatagtttgtgacctatgcttttattactatttttattttttcgagacggagtctcactctgtcccccaggctggagtgcagtggtgccatcttggctcacaggaacctccgccctccccggttcaagcaattcttctgtctcagcctcctgagtacgtagagctataggcagcacaccaccatgcccggctaatttttgtatttttagtagagatagggtttcaccatattggtcgggctggtctcgaactcctgacctcaggtgatccgacccgcctcagcctcccaaagtgctgggatcacaggcatgagccaccatagctggcctgcttttagtccaaaggaacaggggttgggggaagttcccagggcttgagaggtcttgaagccaaacaggggttccagggagactagggtgcccactctggcattttctctccttcccttcaattcacagactctggtggagcaacgttcaggtggttcaggaaagggcagcaataaggtgagatctggacagaggactcgaggcagggggagcttgccaaagagccttctgatgactatgtctttgcctgtcccagaggggccactaggtgtgacagaggaactgcacatcatcagcttcacggtcaaatatacctaccagggtctgaagcaggagctgaaagtgagtgaaaatggagggcaaggagagagaaagcagctttggaagaaggcataagaaggggataaacagaagcctcttggggagggttagcactcctttcctctaacaaatacctgcagctagaaacatcacatccctctctgtgactcctgtcttctccccacacacggacaccctccctgtggtgattatttccaacatgaaccagctctcaattgcctgggcttcagttctctggttcaatttgctcagcccaaaccttcaggtaggggagtggggccgacaggtcccggcgcgagagcaggggtgtggaagcttggtgtgataggttgcttctgagccagcctacactgctcccacccctgcagaaccagcagttcttctccaacccccccaaggccccctggagcttgctgggccctgctctcagttggcagttctcctcctatgttggccgaggcctcaactcagaccagctgagcatgctgagaaacaagctgttcggtacagatttccttttctctcagcctttccccagccttagtcttttctgtccctctgtcctatctatcccaggacccctggcttccctcacatatctgtggctatctgtcccacagggcagaactgtaggactgaggatccattattgtcctgggctgacttcactaaggtaactccctgaatcctgtggagctgctggatctagccccacattccaaatactggccttcccacgtgccctccttccctacaccagaggcaactcctcagcttttgctacctttccattcctccagcgagagagccctcctggcaagttaccattctggacatggctggacaaaattctggagttggtacatgaccacctgaaggatctctggaatgatgggtaaggccttggtcacccttccctcatgggcttgtgcttccgggcttgagagtggagtctctgcaccctcacgtggcaagcagggagagagagcaaagcacggtgcaggccacgtctcctcacatttgttaagaataataaggccgggtgtggtggctcacacctgtaatcccagcactttgggaggccgaggcgggcggatcatgaggtcaggagatcgagaccatcctggctaacacggtgaaaccccgtctctactctaaaaatacaaaaaattagccgggcgtggaggcagacaccctgtagtcccagctactcaggaggctgaggcaggaaaatggcgtgaacctgggagatggagcttgcagtgagccgagattgcgtcactgccctccagccttggggtgacgtagcaagactccgtctcaaaaaaaaaaaaaaaaaacaaccaataatagccataaacagtgtttttgtgaagcactcctacattccagagcttgatgggtgctcttcattaattctctcatctcatccttacaaccatgctgagtggtgggttttgccagcttcatttcatgtgaggaaactgagtttcagagaagttaaagaacttacccaagggacacagttgatattcaaatccaggcctatgtgactccaagcccatgctctttccaccacactgcctaccaacttgtgtagcatttggcttttaaaagtgctattcatgaccaggcacgatggctcacgccttgtaatcccagcattttgggaggccgaggtgggtggatcacctgaggtcaggagtttgagaccagcctggccaacatggcgaaaccccatctctattaaaaatacaaaaattagccgggtgtggtggtgggcgcctgtaatcccagctactcaggaggctgaggaggagaatcgcttgaatttaggagagaaggttacagtgagccaagatcgtgccattgcactccagcctgggtgacagagcaagactctgtctcaaaacaaaaccaaaaaaaagtgctatttgtggccaggcgtggttgctcatgcctgtaatcctagcatttttggggaggctgaggagtacagatcacttgagcccaggagttcaaaactaccctgggccacgtggtgaaaccccaaaccccgtctctacgaaaaatacaaaagttagccaggatgggtggtgtgcacctgtggtcccagctactctggaggctgagaggtggggaagattgcttgagcccgggaggtcgaggtggcagtgagctgtgatcatgccactattctccagcctgggtgacagaatacaccctgtctccctgtctcccagaaaaaaaaaaaagtgctgttcatctgtgtgatctcactgaatcttcgtacttcaaaccctcggaaggtggctattgtcagcaaagtgaagtgacttgtaaaagataaaaaaaagctaagtggcagggcttggtccaaagcctggattccaaacctgggctgtttctccatacaaggggagcagggaggcaggggcctgggggggcagggtgttgggcggtgtcacacgtgacacactgtgctccagacgcatcatgggctttgtgagtcggagccaggagcgccggctgctgaagaagaccatgtctggcacctttctactgcgcttcagtgaatcgtcagaagggggcattacctgctcctgggtggagcaccaggatgatggtagctgctctgccctgccattcccacagcctctcctttctgcctggctctcctctggcccctctgcctgccttgcttcgctggctctgaactgaatgctcagtggtttgggactgggcagccagagagtcagagagctccaaggcccggcctcttccctcaagcccgcctgttcctgcattcactctccagacaaggtgctcatctactctgtgcaaccgtacacgaaggaggtgctgcagtcactcccgctgactgaaatcatccgccattaccagttgctcactgaggagaatatacctgaaaacccactgcgcttcctctatccccgaatcccccgggatgaagcttttgggtgctactaccaggagaaaggtgggaatcgttgacatacttcattgctagattgcagagatctaccagacatccatagatcccactccttcctttaaagcatgggaaaactgatatctagaggaattaagggattcgtccatgggatactgctggttactatggggatgagactgccaggaccatctgcactaggggaaaacctcaggctatatgtctggcccactgatcttctctgcttcttgtatatgttcctcacagttaatctccaggaacggaggaaatacctgaaacacaggctcattgtggtctctaatagagtgagatatgaactgttcattcatcctccctaatccttattggctctgcttcagtgaatcgtcaaaagggggcattaccttctcctgggtggagcaccaggatgatggtcagctgctctgccctgccattcccacagcctctcctttctgccttctcctaagctgcccctattccagtctccccagccttccctccctcctagccccactctagttttttctggttctagtctctcctatctcatatttttctgctgccatccttaggttgtctccacaggggtttctggataataatgatcataatcactggtgttaaggggtacctacttgatgcaagcatggagctttttttttttccagacagggttttgttctgtcgcccaggctggagtgcagtggtgtgatcctggctcactgcagcctcgacctcctgagctcaagcaatacaggcatgcatcaccaaactcagctaattttttttgtattttttgtagagatggggtcttaccatgttgacgcatcaggctgttctgaactcctggactcaagcaatccacccaccttggcctcccaaaagtcagggattacaggcgtgcgaccacaccccgcatatatatatttttttttttttttttttttttttttttttgagacagggtctctgttatccaggctggagttgcagtggataatatgactacgagccttgacctaggggttgaagcaatgctcctgcctcagccaccaagtgctgagactacaggcacacgccaatctacactcaatcacactcagctaattttttaaattttttgtagggatggggtatcactgtgtttgcccaggctggtcttgaactcctggcctcaagcagtctcctgccttggcctcccaaattgccgggattgtaggaatgagccatggcacttggctgggggatagaattttttttttttttttttttttttttttttttgagacagtctcactctcattgcccgggctggagtgcagtggtgcaatttcagctcactgcaacctctgcctcccaggctcaagcaattctcctgcctcagcctatagagtagctgggattacaggcgagcgccacccatgcctggttaatttttgttttttttttgagacagagtctcgccctgttgcccaggctggagtgcagtggcacgatctcagctcactgcaacctctgcctcccaggctcaagcaattctcctgcctcagcctcctgagtactgggactacaagcgcgcacaaccaccacacctggtaatttttgtatttttagtagagacagggttttaccatattggccaggctggtctcaaactcctgacctcatgatccgacccaccttggcctcccaaagtgcagggattacaggcgtgagcctctgcacccggcctaacttttgtatttttagtagaaacagggtttcaccatgttggccaggctggtcatgagctcctggcctcaagtgatctgcccgcctcagcctcccaaagtgcttggattacaggtgtgagccacctggcctgagagtttattatgcgccaggcactaggcaaatggtttgcatttattttctcattttattgaatctacaaaatagtcctgtgaagtaaacactgttactgttttcagctaaggaactggatttagagtagtcaagttttgtacctaaggtacgtggctaatgatacaggtctgttagattccgtagccctgattttaaccaccctactgcctctcaagaattactaggtattgttctcatttatagatgataaatctgaggctcagaaaagttaggccacttgcctaaggtcccccagccaggattcaaactccaggaggcctgattccaaacccatgctctttagccctccgccctactgccttcttagactagcttctgcttattctaccattcctgatttcatttgaaccactgagccctgcccctttgtctgtctttgggtatccaggcaggtggatgaactgcaacaaccgctggagcttaagccagagccagagctggagtcattagagctggaactagggctggtgccagagccagagctcagcctggacttagagccactgctgaaggcagggctggatctggggccagagctagagtctgtgctggagtccactctggagcctgtgatagagcccacactatgcatggtatcacaaacagtgccagagccagaccaaggacctgtatcacagccagtgccagagccagatttgccctgtgatctgagacatttgaacactgagccaatggaaagtaagtgatgagatggagtggcacacattccctttcctacctcttctccctctcccattacagaaaaagctgaactccaagctcctcattggagagaggtccatctgtgattcctttttttaggaattacacatgccttcccccacctccctgctctttcatcccacaagttcccactcaggctcttcccaggcctttcctgccatcctccctcccttgggctgctgggttgggaactcctaactaagatcggggcctcacttttctctctggattacctagtcttcagaaactgtgtaaagattgaagaaatcatgccgaatggtgacccactgttggctggccagaacaccgtggatgaggtttacgtctcccgccccagccacttctacactgatggacccttgatgccttctgacttctaggaaccacatttcctctgttcttttcatatctctttgcccttcctactcctcatagcatgatattgttctccaaggatgggaatcaggcatgtgtcccttccaagctgtgttaactgttcaaactcaggcctgtgtgactccattggggtgagaggtgaaagcataacatgggtacagaggggacaacaatgaatcagaacagatgctgagccataggtctaaataggatcctggaggctgcctgctgtgctgggaggtataggggtcctgggggcaggccagggcagttgacaggtacttggagggctcagggcagtggcttctttccagtatggaaggatttcaacattttaatagttggttaggctaaactggtgcatactggcattggccttggtggggagcacagacacaggataggactccatttctttcttccattccttcatgtctaggataacttgctttcttctttcctttactcctggctcaagccctgaatttcttcttttcctgcaggggttgagagctttctgccttagcctaccatgtgaaactctaccctgaagaaagggatggataggaagtagacctctttttcttaccagtctcctcccctactctgccccctaagctggctgtacctgttcctcccccataaaatgatcctgccaatctaatgtgagtgtgaagtttgcacactagtttatgctacctagtctccactttctcaatgcttaggagacagatcactcctggaggctggggatggtaggattgctggggatttttttttttttaaagagggtctcactctgttgcccaggctagagtgcaatggtgcaatcacagctcactgcagcctcaacctcctgggttcaagcaatcctcctacctcagcctcctgggtagctagcaccatggcatcgccaccatgccctattttttttttttaaagacagggtcttgctatattgcccaggctggtcttgaactgggctcaagtgatcctcacgccttgcctcccaaagtgctgggattataggcatgagccactgtgcttggccaggatttttttttttttttttttgagatggagtttctctcttgttgtccaggctggagtgcaatggtgtgatccggggaattc

SEQ ID NO: 4178 - DNA, 1008 bp, Homo sapiens
ctgtcctctctgacaccaccccggcctgcctctttgttgccatgagagctgcctacctcttcctgctattcctgcctgcaggcttgctggctcagggccagtatgatctggacccgctgccgccgttccctgaccacgtccagtacacccactatagcgaccagatcgacaacccagactactatgattatcaagaggtgactcctcggccctccgaggaacagttccagttccagtcccagcagcaagtccaacaggaagtcatcccagccccaaccccagaaccaggaaatgcagagctggagcccacagagcctgggcctcttgactgccgtgaggaacagtacccgtgcacccgcctctactccatacacaggccttgcaaacagtgtctcaacgaggtctgcttctacagcctccgccgtgtgtacgtcattaacaaggagatctgtgttcgtacagtgtgtgcccacgaggagctcctccgagctgacctctgtcgggacaagttctccaaatgtggcgtgatggccagcagcggcctgtgccaatccgtggcggcctcctgtgccaggagctgtgggagctgctagggtggtgctggcatcctgagtcctggccctcctgggatctggggccctcgggctacctgacctggtgcttttttccccatccccatgttccttttattctgaaaaagttagtggactgcagccctgggggttgcaggctgcggtgcctcaggcccctccttcagcctgtggccacctctggggcacgatgggggctccccactgcccagtctgcccctcgggttgggggagtatcccaggcctctctgtgggacctgggcctgacgggcccttctcagcccgttttgaggacagacagtcccccgaggtaggctacatccccccaccccagctggtctgcttggatttcctacagcccccgtgggcatggaccacctttattttatacaaaattaaaaacaagtttttacaaaaa

SEQ ID NO: 4179 - DNA, 1017 bp, Homo sapiens; identical to SEQ ID NO: 3731

SEQ ID NO: 4180 - DNA, 10211 bp, Homo sapiens
gagaggtcgttttcccgtccccgagagcaagtttatttacaaatgttggagtaataaagaaggcagaacaaaatgagctgggctttggaagaatggaaagaagggctgcctacaagagctcttcagaaaattcaagagcttgaaggacagcttgacaaactgaagaaggaaaagcagcaaaggcagtttcagcttgacagtctcgaggctgcgcctcagaagcaaacacagaaggttgaaaatgaaaaaaccgagggtacaaacctgaaaagggagaatcaaagattgatggaaatatgtgaaagtctggagaaaactaagcagaagatttctcatgaacttcaagtcaaggagtcacaagtgaatttccaggaaggacaactgaattcaggcaaaaaacaaatagaaaaactggaacaggaacttaaaaggtgtaaatctgagcttgaaagaagccaacaagctgcgcagtctgcagatgtctctctgaatccatgcaatacaccacaaaaaatttttacaactccactaacaccaagtcaatattatagtggttccaagtatgaagatctaaaagaaaaatataataaagaggttgaagaacgaaaaagattagaggcagaggttaaagccttgcaggctaaaaaagcaagccagactcttccacaagccaccatgaatcaccgcgacattgcccggcatcaggcttcatcatctgtgttctcatggcagcaagagaagaccccaagtcatctttcatctaattctcaaagaactccaattaggagagatttctctgcatcttacttttctggggaacaagaggtgactccaagtcgatcaactttgcaaatagggaaaagagatgctaatagcagtttctttgacaattctagcagtcctcatcttttggatcaattaaaagcgcagaatcaagagctaagaaacaagattaatgagttggaactacgcctgcaaggacatgaaaaagaaatgaaaggccaagtgaataagtttcaagaactccaactccaactggagaaagcaaaagtggaattaattgaaaaagagaaagttttgaacaaatgtagggatgaactagtgagaacaacagcacaatacgaccaggcgtcaaccaagtatactgcattggaacaaaaactgaaaaaattgacggaagatttgagttgtcagcgacaaaatgcagaaagtgccagatgttctctggaacagaaaattaaggaaaaagaaaaggagtttcaagaggagctctcccgtcaacagcgttctttccaaacactggaccaggagtgcatccagatgaaggccagactcacccaggagttacagcaagccaagaatatgcacaacgtcctgcaggctgaactggataaactcacatcagtaaagcaacagctagaaaacaatttggaagagtttaagcaaaagttgtgcagagctgaacaggcgttccaggcgagtcagatcaaggagaatgagctgaggagaagcatggaggaaatgaagaaggaaaacaacctccttaagagtcactctgagcaaaaggccagagaagtctgccacctggaggcagaactcaagaacatcaaacagtgtttaaatcagagccagaattttgcagaagaaatgaaagcgaagaatacctctcaggaaaccatgttaagagatcttcaagaaaaaataaatcagcaagaaaactccttgactttagaaaaactgaagcttgctgtggctgatctggaaaagcagcgagattgttctcaagaccttttgaagaaaagagaacatcacattgaacaacttaatgataagttaagcaagacagagaaagagtccaaagccttgctgagtgctttagagttaaaaaagaaagaatatgaattgaaagaagagaaaactctgttttcttgttggaaaagtgaaaacgaaaaacttttaactcagatggaatcagaaaaggaaaacttgcagagtaaaattaatcacttggaaacttgtctgaagacacagcaaataaaaagtcatgaatacaacgagagagtaagaacgctggagatggacagagaaaacctaagtgtcgagatcagaaaccttcacaacgtgttagacagtaagtcagtggaggtagagacccagaaactagcttatatggagctacagcagaaagctgagttctcagatcagaaacatcagaaggaaatagaaaatatgtgtttgaagacttctcagcttactgggcaagttgaagatctagaacacaagcttcagttactgtcaaatgaaataatggacaaagaccggtgttaccaagacttgcatgccgaatatgagagcctcagggatctgctaaaatccaaagatgcttctctggtgacaaatgaagatcatcagagaagtcttttggcttttgatcagcagcctgccatgcatcattcctttgcaaatataattggagaacaaggaagcatgccttcagagaggagtgaatgtcgtttagaagcagaccaaagtccgaaaaattctgccatcctacaaaatagagttgattcacttgaattttcattagagtctcaaaaacagatgaactcagacctgcaaaagcagtgtgaagagttggtgcaaatcaaaggagaaatagaagaaaatctcatgaaagcagaacagatgcatcaaagttttgtggctgaaacaagtcagcgcattagtaagttacaggaagacacttctgctcaccagaatgttgttgctgaaaccttaagtgcccttgagaacaaggaaaaagagctgcaacttttaaatgataaggtagaaactgagcaggcagagattcaagaattaaaaaagagcaaccatctacttgaagactctctaaaggagctacaacttttatccgaaaccctaagcttggagaagaaagaaatgagttccatcatttctctaaataaaagggaaattgaagagctgacccaagagaatgggactcttaaggaaattaatgcatccttaaatcaagagaagatgaacttaatccagaaaagtgagagttttgcaaactatatagatgaaagggagaaaagcatttcagagttatctgatcagtacaagcaagaaaaacttattttactacaaagatgtgaagaaaccggaaatgcatatgaggatcttagtcaaaaatacaaagcagcacaggaaaagaattctaaattagaatgcttgctaaatgaatgcactagtctttgtgaaaataggaaaaatgagttggaacagctaaaggaagcatttgcaaaggaacaccaagaattcttaacaaaattagcatttgctgaagaaagaaatcagaatctgatgctagagttggagacagtgcagcaagctctgagatctgagatgacagataaccaaaacaattctaagagcgaggctggtggtttaaagcaagaaatcatgactttaaaggaagaacaaaacaaaatgcaaaaggaagttaatgacttattacaagagaatgaacagctgatgaaggtaatgaagactaaacatgaatgtcaaaatctagaatcagaaccaattaggaactctgtgaaagaaagagagagtgagagaaatcaatgtaattttaaacctcagatggatcttgaagttaaagaaatttctctagatagttataatgcgcagttggtgcaattagaagctatgctaagaaataaggaattaaaacttcaggaaagtgagaaggagaaggagtgcctgcagcatgaattacagacaattagaggagatcttgaaaccagcaatttgcaagacatgcagtcacaagaaattagtggccttaaagactgtgaaatagatgcggaagaaaagtatatttcagggcctcatgagttgtcaacaagtcaaaacgacaatgcacaccttcagtgctctctgcaaacaacaatgaacaagctgaatgagctagagaaaatatgtgaaatactgcaggctgaaaagtatgaactcgtaactgagctgaatgattcaaggtcagaatgtatcacagcaactaggaaaatggcagaagaggtagggaaactactaaatgaagttaaaatattaaatgatgacagtggtcttctccatggtgagttagtggaagacataccaggaggtgaatttggtgaacaaccaaatgaacagcaccctgtgtctttggctccattggacgagagtaattcctacgagcacttgacattgtcagacaaagaagttcaaatgcactttgccgaattgcaagagaaattcttatctttacaaagtgaacacaaaattttacatgatcagcactgtcagatgagctctaaaatgtcagagctgcagacctatgttgactcattaaaggccgaaaatttggtcttgtcaacgaatctgagaaactttcaaggtgacttggtgaaggagatgcagctgggcttggaggaggggctcgttccatccctgtcatcctcttgtgtgcctgacagctctagtcttagcagtttgggagactcctccttttacagagctcttttagaacagacaggagatatgtctcttttgagtaatttagaaggggctgtttcagcaaaccagtgcagtgtagatgaagtattttgcagcagtctgcaggaggagaatctgaccaggaaagaaaccccttcggccccagcgaagggtgttgaagagcttgagtccctctgtgaggtgtaccggcagtccctcgagaagctagaagagaaaatggaaagtcaagggattatgaaaaataaggaaattcaagagctcgagcagttattaagttctgaaaggcaagagcttgactgccttaggaagcagtatttgtcagaaaatgaacagtggcaacagaagctgacaagcgtgactctggagatggagtccaagttggcggcagaaaagaaacagacggaacaactgtcacttgagctggaagtagcacgactccagctacaaggtctggacttaagttctcggtctttgcttggcatcgacacagaagatgctattcaaggccgaaatgagagctgtgacatatcaaaagaacatacttcagaaactacagaaagaacaccaaagcatgatgttcatcagatttgtgataaagatgctcagcaggacctcaatctagacattgagaaaataactgagactggtgcattgaaacccacaggagagtgctctggggaacagtccccagataccaattatgagcctccaggggaagataaaacccagggctcttcagaatgcatttctgaattgtcattttctggtcctaatgctttggtacctatggatttcctggggaatcaggaagatatccataatcttcaactgcgggtaaaagagacatcaaatgagaatttgagattacttcatgtgatagaggaccgtgacagaaaagttgaaagtttgctaaatgaaatgaaagaattagactcaaaactccatttacaggaggtacaactaatgaccaaaattgaagcatgcatagaattggaaaaaatagttggggaacttaagaaagaaaactcagatttaagtgaaaaattggaatatttttcttgtgatcaccaggagttactccagagagtagaaacttctgaaggcctcaattctgatttagaaatgcatgcagataaatcatcacgtgaagatattggagataatgtggccaaggtgaatgacagctggaaggagagatttcttgatgtggaaaatgagctgagtaggatcagatcggagaaagctagcattgagcatgaagccctctacctggaggctgacttagaggtagttcaaacagagaagctatgtttagaaaaagacaatgaaaataagcagaaggttattgtctgccttgaagaagaactctcagtggtcacaagtgagagaaaccagcttcgtggagaattagatactatgtcaaaaaaaaccacggcactggatcagttgtctgaaaaaatgaaggagaaaacacaagagcttgagtctcatcaaagtgagtgtctccattgcattcaggtggcagaggcagaggtgaaggaaaagacggaactccttcagactttgtcctctgatgtgagtgagctgttaaaagacaaaactcatctccaggaaaagctgcagagtttggaaaaggactcacaggcactgtctttgacaaaatgtgagctggaaaaccaaattgcacaactgaataaagagaaagaattgcttgtcaaggaatctgaaagcctgcaggccagactgagtgaatcagattatgaaaagctgaatgtctccaaggccttggaggccgcactggtggagaaaggtgagttcgcattgaggctgagctcaacacaggaggaagtgcatcagctgagaagaggcatcgagaaactgagagttcgcattgaggccgatgaaaagaagcagctgcacatcgcagagaaactgaaagaacgcgagcgggagaatgattcacttaaggataaagttgagaaccttgaaagggaattgcagatgtcagaagaaaaccaggagctagtgattcttgatgccgagaattccaaagcagaagtagagactctaaaaacacaaatagaagagatggccagaagcctgaaagtttttgaattagaccttgtcacgttaaggtctgaaaaagaaaatctgacaaaacaaatacaagaaaaacaaggtcagttgtcagaactagacaagttactctcttcatttaaaagtctgttagaagaaaaggagcaagcagagatacagatcaaagaagaatctaaaactgcagtggagatgcttcagaatcagttaaaggagctaaatgaggcagtagcagccttgtgtggtgaccaagaaattatgaaggccacagaacagagtctagacccaccaatagaggaagagcatcagctgagaaatagcattgaaaagctgagagcccgcctagaagctgatgaaaagaagcagctctgtgtcttacaacaactgaaggaaagtgagcatcatgcagatttacttaagggtagagtggagaaccttgaaagagagctagagatagccaggacaaaccaagagcatgcagctcttgaggcagagaattccaaaggagaggtagagaccctaaaagcaaaaatagaagggatgacccaaagtctgagaggtctggaattagatgttgttactataaggtcagaaaaagaaaatctgacaaatgaattacaaaaagagcaagagcgaatatctgaattagaaataataaattcatcatttgaaaatattttgcaagaaaaagagcaagagaaagtacagatgaaagaaaaatcaagcactgccatggagatgcttcaaacacaattaaaagagctcaatgagagagtggcagccctgcataatgaccaagaagcctgtaaggccaaagagcagaatcttagtagtcaagtagagtgtcttgaacttgagaaggctcagttgctacaaggccttgatgaggccaaaaataattatattgttttgcaatcttcagtgaatggcctcattcaagaagtagaagatggcaagcagaaactggagaagaaggatgaagaaatcagtagactgaaaaatcaaattcaagaccaagagcagcttgtctctaaactgtcccaggtggaaggagagcaccaactttggaaggagcaaaacttagaactgagaaatctgacagtggaattggagcagaagatccaagtgctacaatccaaaaatgcctctttgcaggacacattagaagtgctgcagagttcttacaagaatctagagaatgagcttgaattgacaaaaatggacaaaatgtcctttgttgaaaaagtaaacaaaatgactgcaaaggaaactgagctgcagagggaaatgcatgagatggcacagaaaacagcagagctgcaagaagaactcagtggagagaaaaataggctagctggagagttgcagttactgttggaagaaataaagagcagcaaagatcaattgaaggagctcacactagaaaatagtgaattgaagaagagcctagattgcatgcacaaagaccaggtggaaaaggaagggaaagtgagagaggaaatagctgaatatcagctacggcttcatgaagctgaaaagaaacaccaggctttgcttttggacacaaacaaacagtatgaagtagaaatccagacataccgagagaaattgacttctaaagaagaatgtctcagttcacagaagctggagatagaccttttaaagtctagtaaagaagagctcaataattcattgaaagctactactcagattttggaagaattgaagaaaaccaagatggacaatctaaaatatgtaaatcagttgaagaaggaaaatgaacgtgcccaggggaaaatgaagttgttgatcaaatcctgtaaacagctggaagaggaaaaggagatactgcagaaagaactctctcaacttcaagctgcacaggagaagcagaaaacaggtactgttatggataccaaggtcgatgaattaacaactgagatcaaagaactgaaagaaactcttgaagaaaaaaccaaggaggcagatgaatacttggataagtactgttccttgcttataagccatgaaaagttagagaaagctaaagagatgttagagacacaagtggcccatctgtgttcacagcaatctaaacaagattcccgagggtctcctttgctaggtccagttgttccaggaccatctccaatcccttctgttactgaaaagaggttatcatctggccaaaataaagcttcaggcaagaggcaaagatccagtggaatatgggagaatggtggaggaccaacacctgctaccccagagagcttttctaaaaaaagcaagaaagcagtcatgagtggtattcaccctgcagaagacacggaaggtactgagtttgagccagagggacttccagaagttgtaaagaaagggtttgctgacatcccgacaggaaagactagcccatatatcctgcgaagaacaaccatggcaactcggaccagcccccgcctggctgcacagaagttagcgctatccccactgagtctcggcaaagaaaatcttgcagagtcctccaaaccaacagctggtggcagcagatcacaaaaggtcaaagttgctcagcggagcccagtagattcaggcaccatcctccgagaacccaccacgaaatccgtcccagtcaataatcttcctgagagaagtccgactgacagccccagagagggcctgagggtcaagcgaggccgacttgtccccagccccaaagctggactggagtccaagggcagtgagaactgtaaggtccagtgaaggcactttgtgtgtcagtacccctgggaggtgccagtcattgaatagataaggctgtgcctacaggacttctctttagtcagggcatgctttattagtgaggagaaaacaattccttagaagtcttaaatatattgtactctttagatctcccatgtgtaggtattgaaaaagtttggaagcactgatcacctgttagcattgccattcctctactgcaatgtaaatagtataaagctatgtatataaagctttttggtaatatgttacaattaaaatgacaagcactatatcacaatctctgtttgtatgtgggttttacactaaaaaaatgcaaaacacattttattcttctaattaacagctcctaggaaaatgtagacttttgctttatgatattctatctgtagtatgaggcatggaatagttttgtatcgggaatttctcagagctgagtaaaatgaaggaaaagcatgttatgtgtttttaaggaaaatgtgcacacatatacatgtaggagtgtttatctttctcttacaatctgttttagacatctttgcttatgaaacctgtacatatgtgtgtgtgggtatgtgtttatttccagtgagggctgcaggcttcctagaggtgtgctataccatgcgtctgtcgttgtgcttttttctgtttttagaccaattttttacagttctttggtaagcattgtcgtatctggtgatggattaacatatagcctttgttttctaataaaatagtcgccttcgttttctgtaaaaaaaaaaaaaaaaaaaaaa

SEQ ID NO: 4181 - DNA, 670 bp, Homo sapiens
ggcacgagctcatctgacgactgacagctgatggcaccgccagcctctgtcccttggccaggactgtcacacggctgactctcagcaggggcagtagaatgaaagagggcatgtctaataacagcaccactagcatctcccaagccaggaaagctgtggagcagctaaagatggaagcctgtatggacagggtcaaggtctcccaggcagccgcggacctcctggcctactgtgaagctcacgtgcgggaagatcctctcatcattccagtgcctgcatcagaaaacccctttcgcgagaagaagttcttttgtaccattctctaactccgtgtgtgatgaaaacgcctccttttctgaccttcaaagtcccctgtagagaccatgcatgctctaagccttagggagtgagaccaacacccatccctgcccagccaacagtggccggggcttgtcttatgtttccatctgttttcttcgtggcattcaatttcatttttttccttttcattttcatgttattttcattattggcaaagaaaatcaaaatgtttatagccaaataacaaatgtgccatgtaaaagtaagtctggacttaagagtttaaaatttttaaacatcagtttccaagtttatatcatattaatacatttcagtggataatttattt

SEQ ID NO: 4182 - DNA, 2516 bp, Homo sapiens; identical to SEQ ID NO: 3103

SEQ ID NO: 4183 - DNA, 1125 bp, Homo sapiens; identical to SEQ ID NO: 3736

SEQ ID NO: 4184 - DNA, 2600 bp, Homo sapiens
aggcagtggagccccggcggcggcggcggcggcgcgcgggggcgacgcgcgggaacaacgcgagtcggcgcgcgggacgaagaataatcatgggccagactgggaagaaatctgagaagggaccagtttgttggcggaagcgtgtaaaatcagagtacatgcgactgagacagctcaagaggttcagacgagctgatgaagtaaagagtatgtttagttccaatcgtcagaaaattttggaaagaacggaaatcttaaaccaagaatggaaacagcgaaggatacagcctgtgcacatcctgacttctgtgagctcattgcgcgggactagggagtgttcggtgaccagtgacttggattttccaacacaagtcatcccattaaagactctgaatgcagttgcttcagtacccataatgtattcttggtctcccctacagcagaattttatggtggaagatgaaactgttttacataacattccttatatgggagatgaagttttagatcaggatggtactttcattgaagaactaataaaaaattatgatgggaaagtacacggggatagagaatgtgggtttataaatgatgaaatttttgtggagttggtgaatgcccttggtcaatataatgatgatgacgatgatgatgatggagacgatcctgaagaaagagaagaaaagcagaaagatctggaggatcaccgagatgataaagaaagccgcccacctcggaaatttccttctgataaaatttttgaagccatttcctcaatgtttccagataagggcacagcagaagaactaaaggaaaaatataaagaactcaccgaacagcagctcccaggcgcacttcctcctgaatgtacccccaacatagatggaccaaatgctaaatctgttcagagagagcaaagcttacactcctttcatacgcttttctgtaggcgatgttttaaatatgactgcttcctacatccttttcatgcaacacccaacacttataagcggaagaacacagaaacagctctagacaacaaaccttgtggaccacagtgttaccagcatttggagggagcaaaggagtttgctgctgctctcaccgctgagcggataaagaccccaccaaaacgtccaggaggccgcagaagaggacggcttcccaataacagtagcaggcccagcacccccaccattaatgtgctggaatcaaaggatacagacagtgatagggaagcagggactgaaacggggggagagaacaatgataaagaagaagaagagaagaaagatgaaacttcgagctcctctgaagcaaattctcggtgtcaaacaccaataaagatgaagccaaatattgaacctcctgagaatgtggagtggagtggtgctgaagcctcaatgtttagagtcctcattggcacttactatgacaatttctgtgccattgctaggttaattgggaccaaaacatgtagacaggtgtatgagtttagagtcaaagaatctagcatcatagctccagctcccgctgaggatgtggatactcctccaaggaaaaagaagaggaaacaccggttgtgggctgcacactgcagaaagatacagctgaaaaaggacggctcctctaaccatgtttacaactatcaaccctgtgatcatccacggcagccttgtgacagttcgtgcccttgtgtgatagcacaaaatttttgtgaaaagttttgtcaatgtagttcagagtgtcaaaaccgctttccgggatgccgctgcaaagcacagtgcaacaccaagcagtgcccgtgctacctggctgtccgagagtgtgaccctgacctctgtcttacttgtggagccgctgaccattgggacagtaaaaatgtgtcctgcaagaactgcagtattcagcggggctccaaaaagcatctattgctggcaccatctgacgtggcaggctgggggatttttatcaaagatcctgtgcagaaaaatgaattcatctcagaatactgtggagagattatttctcaagatgaagctgacagaagagggaaagtgtatgataaatacatgtgcagctttctgttcaacttgaacaatgattttgtggtggatgcaacccgcaagggtaacaaaattcgttttgcaaatcattcggtaaatccaaactgctatgcaaaagttatgatggttaacggtgatcacaggataggtatttttgccaagagagccatccagactggcgaagagctgttttttgattacagatacagccaggctgatgccctgaagtatgtcggcatcgaaagagaaatggaaatcccttgacatctgctacctcctccccctcctctgaaacagctgccttagcttcaggaacctcgagtactgtgggcaatttagaaaaagaacatgcagtttgaaattctgaatttgcaaagtactgtaagaataatttatagtaatgagtttaaaaatcaactttttattgccttctcaccagctgcaaagtgttttgtaccagtgaatttttgcaataatgcagtatggtacatttttcaactttgaataaagaatacttgaacttgtcaaaaaaaa

SEQ ID NO: 4185 - DNA, 2740 bp, Homo sapiens; identical to SEQ ID NO: 3104

SEQ ID NO: 4186 - DNA, 2327 bp, Homo sapiens
aaatggtagaactagtgatctcacccagcctcactgtaaacagcgattgtctggataaactgaagtttaaccgtgctgacgctgctgtgtggactctgagtgacagacaaggcatcaccaaatcggcccccctgagagtgtcccagctcttctccagatcttgcccacgtgtcctcccccgccagccttccacagccatggcagcctacggccagacgcagtacagtgcggggatccagcaggctaccccctatacagcttacccacctccagcacaagcctatggaatcccttcctacagcatcaagacagaagacagcttgaaccattcccctggccagagtggattcctcagctatggctccagcttcagcacctcacccactggacagagcccatacacctaccagatgcacggcacaacagggttctatcaaggaggaaatggactgggcaacgcagccggtttcgggagtgtgcaccaggactatccttcctaccccggcttcccccagagccagtacccccagtattacggctcatcctacaaccctccctacgtcccggccagcagcatctgcccttcacccctctccacgtccacctacgtcctccaggaggcatctcacaacgtccccaaccagagttccgagtcacttgctggtgaatacaacacacacaatggaccttccacaccagcgaaagagggagacacagacaggccgcaccgggcctccgatgggaagctccgaggccggtctaagaggagcagtgacccgtccccggcaggggacaatgagattgagcgtgtgttcgtgtgggacttggatgagacaataattatttttcactccttactcacggggacatttgcatccagatacgggaaggacaccacgacgtccgtgcgcattggccttatgatggaagagatgatcttcaaccttgcagatacacatctgttcttcaatgacctggaggattgtgaccagatccacgttgatgacgtctcatcagatgacaatggccaagatttaagcacatacaacttctccgctgacggcttccacagttcggccccaggagccaacctgtgcctgggctctggcgtgcacggcggcgtggactggatgaggaagctggccttccgctaccggcgggtgaaggagatgtacaatacctacaagaacaacgttggtgggttgataggcactcccaaaagggagacctggctacagctccgagctgagctggaagctctcacagacctctggctgacccactccctgaaggcactaaacctcatcaactcccggcccaactgtgtcaatgtgctggtcaccaccactcaactaattcctgccctggccaaagtcctgctatatggcctggggtctgtgtttcctattgagaacatctacagtgcaaccaagacagggaaggagagctgcttcgagaggataatgcagagattcggcagaaaagctgtctacgtggtgatcggtgatggtgtggaagaggagcaaggagcgaaaaagcacaacatgcctttctggcggatatcctgccacgcgaacctggaggcactgaggcacgccctggagctggagtatttatagcaggatcagcagcatctccacctgccatctcaccctcagaccccctcgccttccccacctccccaccgagaactccagagacccagatgttggacaccaggaaggggccccacagccgagacgactgtccagtgaccatctcagaagccgtccatcagtccaaatgggggttctgagaaggaaagtacccaacattggcttcggagtatttgactttggggaaaagggctggctcggagtctagactcttctgtaagactcacagaacaaaagcaaggaattgctgatttggggggtgcctggtgatgaggaggggatgggtttgtcttgtcttctttttaatttatggactagtctcattactccggaattatgctcttgtacctgtgtggctgggtttcttagtcgttggtttggtttggttttttgaactggtatgtggggtggttcacagttctaatgtaagcactctattctccaagttgtgctttgtggggacaatcattctttgaacattagagaggaaggcagttcaagctgttgaaaagactattgcttatttttgtttttaaagacctacctgacgtcatgtggacagtgcacgtgccttacgctacatcttgttttctaggaagagggggatgctgggaaggaatgggtgctttgtgatggataaaaggcattaaataaaaccacgtttacattttg

SEQ ID NO: 4187 - DNA, 545 bp, Homo sapiens
atggccctgctactggccctcagcctgctggttctctggacttccccagccccaactctgagtggcaccaatgatgctgaagactgctgcctgtctgtgacccagaaacccatccctgggtacatcgtgaggaacttccactaccttctcatcaaggatggctgcagggtgcctgctgtagtgttcaccacactgaggggccgccagctctgtgcacccccagaccagccctgggtagaacgcatcatccagagactgcagaggacctcagccaagatgaagcgccgcagcagttaacctatgaccgtgcagagggagcccggagtccgagtcaagcattgtgaattattacctaacctggggaaccgaggaccagaaggaaggaccaggcttccagctcctctgcaccagacctgaccagccaggacagggcctggggtgtgtgtgagtgtgagtgtgagcgagagggtgagtgtggtctagagtaaagctgctccacccccagattgcaatgctaccaataaagccgcctggtgtttacaact

SEQ ID NO: 4188 - DNA, 1669 bp, Homo sapiens
ggcacgagcggcacgagcggcggtagtcagggcagtttctacgcaggcttaaggaggcttcgggctcctgggatttctgtccgcgctcctggcccacgtccttcgcgccagagcaggttcgcaaactcctcagacccttctgctcccggccgccgctttccgccggggcgagacccccaggttcaaaatgagcctgtttggaacaacctcaggttttggaaccagtgggaccagcatgtttggcagtgcaactacagacaatcacaatcccatgaaggatattgaagtaacatcatctcctgatgatagcattggttgtctgtcttttagcccaccaaccttgccggggaactttcttattgcaggatcatgggctaatgatgttcgctgctgggaagttcaagacagtggacagaccattccaaaagcccagcagatgcacactgggcctgtgcttgatgtctgctggagtgacgatgggagcaaagtgtttacggcatcgtgtgataaaactgccaaaatgtgggacctcagcagtaaccaagcgatacagatcgcacagcatgatgctcctgttaaaaccatccattggatcaaagctccaaactacagctgtgtgatgactgggagctgggataagactttaaagttttgggatactcgatcgtcaaatcctatgatggttttgcaactccctgaaaggtgttactgtgctgacgtgatataccccatggctgtggtggcaactgcagagaggggcctgattgtctatcagctagagaatcaaccttctgaattcaggaggatagaatctccactgaaacatcagcatcggtgtgtggctatttttaaagacaaacagaacaagccgactggttttgccctgggaagtatcgaggggagagttgctattcactatatcaaccccccgaaccccgccaaagataacttcacctttaaatgtcatcgatctaatggaaccaacacttcagctcctcaggacatttatgcggtaaatggaatcgcgttccatcctgttcatggcacccttgcaactgtgggatctgatggtagattcagcttctgggacaaagatgccagaacaaaactaaaaacttcggaacagttagatcagcccatctcagcttgctgtttcaatcacaatggaaacatatttgcatacgcttccagctacgactggtcaaagggacatgaattttataatccccagaaaaaaaattacattttcctgcgtaatgcggccgaagagctaaagcccaggaataagaagtagtggctggagactctggctcagccagagttgtttctctccactctgcctcatctctgtacgaatttgggtcccagccttgttgggttgtcagccatggacatggatttcaacccctggagaaaacgatgtcattgttcagcagctgagagccccaggcgtccgcggcgacttgccgtctctccattccactgcctgttgcagagtttttctgtaactaagggggttgaggttattgtagacgttagattgcgggcaccgccagggattttgcagcgcttcagtgtacgtgttagagaatattggaaaagcgtctgtgagccccgtgctgtattttgtaataaagtcttttgcagattgaataaaaaaaaaaaaaaa

SEQ ID NO: 4189 - DNA, 482 bp, Homo sapiens
tgcgctgacagcagccatggcgagcggcagtggagacagcgtcacccgtcggagcgtggcatcacagtttttcactcaagaggaggggccgggcatcgatggcatgaccacctcagagagggtggtggatcttctgaaccaggcggcgctgatcaccaatgactcaaagatcacagtgctcaaacaggtccaggagctgatcatcaacaaagaccccacactactggacaacttcctggatgagatcatcgcattccaagcagacaagtcaatcgaagtgcgaaaatttgtcatcggcttcatcgaggaggcatgcaagcgagacatcgagttgctgctgaaactcattgcaaacctcaacatgctcttgagggacgagaatgtgaacgtggtgaagaaggctatcctcaccatgacccagctctacaaggtggccctgcagtggatggtaaagtcacgggtcattagcgagctacaggagg

SEQ ID NO: 4190 - DNA, 934 bp, Homo sapiens
gagcgagcgcgctgcagcgcgcgcatggctagcacggcttcggagatcatcgccttcatggtctccatctcaggctgggtactggtgtcctccacgctgcccaccgactactggaaggtgtctaccatcgacggcacggtcatcacaaccgccacctattgggccaacctgtggaaggcgtgcgttaccgactccacgggcgtctccaactgcaaggacttcccctccatgctggcgctggacggttatatacaggcatgtagaggacttatgatcgctgctgtcagcctgggcttctttggttccatatttgcgctctttggaatgaagtgtaccaaagtcggaggctccgataaagccaaagctaaaattgcttgtttggctgggattgtattcatactgtcagggctgtgctcaatgactggatgttccctatatgcaaacaaaatcacaacggaattctttgatcctctctttgttgagcaaaagtatgaattaggagccgctctgtttattggatgggcaggagcctcactgtgcataattggtggtgtcatattttgcttttcaatatctgacaacaacaaaacacccagatacacatacaacggggccacatctgtcatgtcttctcggacaaagtatcatggtggagaagattttaaaacaacaaacccttcaaaacagtttgataaaaatgcttatgtctaaaagagctcgctggcaagctgcctcttgagtttgttataaaagcgaactgttcacaaaatgatcccatcaaggccctcccataattaacactcaaaactatttttaaaatatgcatttgaagcatctgttgattgtatggatgtaagtgttcttacatagttagttatatactaatcattttctgttgtggctttctataaaaaataaacagtttatttacagg

SEQ ID NO: 4191 - DNA, 1356 bp, Homo sapiens
gtatatataacgtgatgagcgtacgggtgcggagacgcaccggagcgctcgcccagccgccgyctccaagcccctgaggtttccggggaccacaatgaacaagttgctgtgctgcgcgctcgtgtttctggacatctccattaagtggaccacccaggaaacgtttcctccaaagtaccttcattatgacgaagaaacctctcatcagctgttgtgtgacaaatgtcctcctggtacctacctaaaacaacactgtacagcaaagtggaagaccgtgtgcgccccttgccctgaccactactacacagacagctggcacaccagtgacgagtgtctatactgcagccccgtgtgcaaggagctgcagtacgtcaagcaggagtgcaatcgcacccacaaccgcgtgtgcgaatgcaaggaagggcgctaccttgagatagagttctgcttgaaacataggagctgccctcctggatttggagtggtgcaagctggaaccccagagcgaaatacagtttgcaaaagatgtccagatgggttcttctcaaatgagacgtcatctaaagcaccctgtagaaaacacacaaattgcagtgtctttggtctcctgctaactcagaaaggaaatgcaacacacgacaacatatgttccggaaacagtgaatcaactcaaaaatgtggaatagatgttaccctgtgtgaggaggcattcttcaggtttgctgttcctacaaagtttacgcctaactggcttagtgtcttggtagacaatttgcctggcaccaaagtaaacgcagagagtgtagagaggataaaacggcaacacagctcacaagaacagactttccagctgctgaagttatggaaacatcaaaacaaagcccaagatatagtcaagaagatcatccaagatattgacctctgtgaaaacagcgtgcagcggcacattggacatgctaacctcaccttcgagcagcttcgtagcttgatggaaagcttaccgggaaagaaagtgggagcagaagacattgaaaaaacaataaaggcatgcaaacccagtgaccagatcctgaagctgctcagtttgtggcgaataaaaaatggcgaccaagacaccttgaagggcctaatgcacgcactaaagcactcaaagacgtaccactttcccaaaactgtcactcagagtctaaagaagaccatcaggttccttcacagcttcacaatgtacaaattgtatcagaagttatttttagaaatgataggtaaccaggtccaatcagtaaaaataagctgcttataactggaaatggccattgagctgtttcctcacaattggcgagatcccatggatgataa

SEQ ID NO: 4192 - DNA, 1050 bp, Homo sapiens; identical to SEQ ID NO: 3111

SEQ ID NO: 4193 - DNA, 1755 bp, Homo sapiens
gaattccggcggcggccgcgagcgcgctcggtccccggcgccggcctcgcctcctcgcagcagcgccatggatgagttccacccgttcatcgaggccctgctgcctcacgtccgcgccttcgcctacacctggttcaacctgcaggcgcggaagcgcaagtacttcaagaagcacgagaagcggatgtcgaaggacgaggagcgtgcggtcaaggacgagctgctgggcgagaagcccgaggtcaagcagaagtgggcgtcgcggctgctggccaagctgcgcaaggacatccggcccgagtgccgcgaggacttcgtgctgagcatcaccggcaagaaggcgccgggctgcgtgctctccaaccccgaccagaagggcaagatgcggcgcatcgactgtctccggcaggcggacaaggtgtggcggctggacctggtcatggtcatcctgttcaagggcatcccgctggagagcaccgacggcgagcgcctggtcaaggctgcgcagtgcggtcacccggtcctgtgcgtgcagccgcaccacattggcgtggccgtcaaggagctggacctctacctggcctacttcgtgcgtgagcgagatgcagagcaaagcggcagtccccggacagggatgggctctgaccaggaggacagcaagcccatcacgctggacacgaccgacttccaggagagctttgtcacctccggcgtgttcagcgtcactgagctcatccaagtgtcccggacacccgtggtgactggaacaggacccaacttctccctgggggagctgcaggggcacctggcatacgacctgaacccagccagcactggcctcagaagaacgctgcccagcacctcctccagtgggagcaagcggcacaaatcgggctcgatggaggaagacgtggacacgagccctggcggcgattactacacttcgcccagctcgcccacgagtagcagccgcaactggacggaggacatggaaggaggcatctcgtccccggtgaagaagacagagatggacaagtcaccattcaacagcccgtccccccaggactctccccgcctctccagcttcacccagcaccaccggcccgtcatcgccgtgcacagcgggatcgcccggagcccacacccgtcctccgctctgcatttccctacgacgtccatcctaccccagacggcctccacctacttcccccacacggccatccgctacccacctcatctcaacccccaggacccgctcaaagatcttgtctcgctggcctgcgacccagccagccagcaacctggaccgttaaatggaagtggtcagctcaaaatgcccagccactgcctttctgctcagatgctggcacctccgcccccggggctgccacggctggcgctcccccctgccaccaaacccgccaccacctccgagggaggagccacgtcgccgacctcgccttcctactctccgcccgacacgtcccctgcaaaccgttcctttgtgggattaggaccaagggatcctgcgggcatttatcaggcacagtcctggtatctgggatagcaaaggtcttcttccctcgccccttctccatcgtcccaggaatcccagggggcagcacagccgcccccggcccacgtttttggtggaaaattagagtgaacaagaacacccctgccgactcccagcccggccaaaaagacaaaacacatagacgcacacactcaggaggaaaagaaaaaccggaattc

SEQ ID NO: 4194 - DNA, 1807 bp, Homo sapiens
agcaggtggaaggagaggaagcggatgccgtggggtttacagcaggaaaatccgtggagacagcagatccgagaagcggcgatgtttgcgtagaaccctgtacgtgcttccttcggcctgtcgctcttcccttctctctgaccagcaccatgcttctcctggtgacaagccttctgctctgtgagttaccacacccagcattcctcctgatcccagagaaatcggatctgcgaacagtggcaccagcctctagtctcaatgtgaggtttgactccaggacgatgaatttaagctgggactgccaagaaaacacaaccttcagcaagtgtttcttaactgacaagaagaacagagtcgtggaacccaggctcagtaacaacgaatgttcgtgcacatttcgtgaaatttgtctgcatgaaggagtcacatttgaggttcacgtgaatactagtcaaagaggatttcaacagaaactgctttatccaaattcaggaagggagggtaccgctgctcagaatttctcctgtttcatctacaatgcggatttaatgaactgtacctgggcgaggggtccgacggccccccgtgacgtccagtattttttgtacatacgaaactcaaagagaaggagggagatccggtgtccttattacatacaagactcaggaacccatgtgggatgtcacctggataacctgtcaggattaacgtctcgcaattactttctggttaacggaaccagccgagaaattggcatccaattctttgattcacttttggacacaaagaaaatagaacgattcaaccctcccagcaatgtcaccgtacgttgcaacacgacgcactgcctcgtacggtggaaacagcccaggacctatcagaagctgtcgtacctggactttcagtaccagctggacgtccacagaaagaatacccagcctggcacggaaaacctactgattaatgtttctggtgatttggaaaatagatacaactttccaagctctgagcccagagcaaaacacagtgtgaagatcagagctgcagacgtccgcatcttgaattggagctcctggagtgaagccattgaatttggttctgacgacgggaacctcggctctgtgtacatttatgtgctcctaatcgtgggaacccttgtctgtggcatcgtcctcggcttcctctttaaaaggttccttaggatacagcggctgttcccgccagttccacagatcaaagacaaactgaatgataaccatgaggtggaagacgagatcatctgggaggaattcaccccagaggaagggaaaggctaccgcgaagaggtcttgaccgtgaaggaaattacctgagacccagagggtgtaggaatggcatggacatctccgcctccgcgacacgggggaactgttttcttgatgatgctgtgaacctttatatcattttctatgtttttatttaaaaacatgacatttggggccaggcgcggtggctcacgcctgtaatcccagcactttgggaggccaaggcaggcggatcacctgaggtcaggagttcaagaccagcctgcccaacatggtgaaaccccatctggactaaaaatgcagaaatttacccaggcacggcggcggacgcccatcatcccagctacttgggaggctgaggcaggagaattgcttgaacccgtgaggcggaggttgtagtgagccaagatcgcaccattgcacaccaacctgcgtgacagagcaagattgcatctcaaaacaaacaataataataaataataaaaacctgatatttggctggg

SEQ ID NO: 4195 - DNA, 2619 bp, Homo sapiens
gactcctaggggcttgcagacctagtgggagagaaagaacatcgcagcagccaggcagaaccaggacaggtgaggtgcaggctggctttcctctcgcagcgcggtgtggagtcctgtcctgcctcagggcttttcggagcctggatcctcaaggaacaagtagacctggccgcggggagtggggagggaaggggtgtctattgggcaacagggcggcaaagccctgaataaaggggcgcagggcaggcgcaagtgcagagccttcgtttgccaagtcgcctccagaccgcagacatgaaacttgtcttcctcgtcctgctgttcctcggggccctcggactgtgtctggctggccgtaggagaaggagtgttcagtggtgcgccgtatcccaacccgaggccacaaaatgcttccaatggcaaaggaatatgagaaaagtgcgtggccctcctgtcagctgcataaagagagactcccccatccagtgtatccaggccattgcggaaaacagggccgatgctgtgacccttgatggtggtttcatatacgaggcaggcctggccccctacaaactgcgacctgtagcggcggaagtctacgggaccgaaagacagccacgaactcactattatgccgtggctgtggtgaagaagggcggcagctttcagctgaacgaactgcaaggtctgaagtcctgccacacaggccttcgcaggaccgctggatggaatgtccctacagggacacttcgtccattcttgaattggacgggtccacctgagcccattgaggcagctgtggccaggttcttctcagccagctgtgttcccggtgcagataaaggacagttccccaacctgtgtcgcctgtgtgcggggacaggggaaaacaaatgtgccttctcctcccaggaaccgtacttcagctactctggtgccttcaagtgtctgagagacggggctggagacgtggcttttatcagagagagcacagtgtttgaggacctgtcagacgaggctgaaagggacgagtatgagttactctgcccagacaacactcggaagccagtggacaagttcaaagactgccatctggcccgggtcccttctcatgccgttgtggcacgaagtgtgaatggcaaggaggatgccatctggaatcttctccgccaggcacaggaaaagtttggaaaggacaagtcaccgaaattccagctctttggctcccctagtgggcagaaagatctgctgttcaaggactctgccattgggttttcgagggtgcccccgaggatagattctgggctgtaccttggctccggctacttcactgccatccagaacttgaggaaaagtgaggaggaagtggctgcccggcgtgcgcgggtcgtgtggtgtgcggtgggcgagcaggagctgcgcaagtgtaaccagtggagtggcttgagcgaaggcagcgtgacctgctcctcggcctccaccacagaggactgcatcgccctggtgctgaaaggagaagctgatgccatgagtttggatggaggatatgtgtacactgcatgcaaatgtggtttggtgcctgtcctggcagagaactacaaatcccaacaaagcagtgaccctgatcctaactgtgtggatagacctgtggaaggatatcttgctgtggcggtggttaggagatcagacactagccttacctggaactctgtgaaaggcaagaagtcctgccacaccgccgtggacaggactgcaggctggaatatccccatgggcctgctcttcaaccagacgggctcctgcaaatttgatgaatatttcagtcaaagctgtgcccctgggtctgacccgagatctaatctctgtgctctgtgtattggcgacgagcagggtgagaataagtgcgtgcccaacagcaacgagagatactacggctacactggggctttccggtgcctggctgagaatgctggagacgttgcatttgtgaaagatgtcactgtcttgcagaacactgatggaaataacaatgaggcatgggctaaggatttgaagctggcagactttgcgctgctgtgcctcgatggcaaacggaagcctgtgactgaggctagaagctgccatcttgccatggccccgaatcatgccgtggtgtctcggatggataaggtggaacgcctgaaacaggtgctgctccaccaacaggctaaatttgggagaaatggatctgactgcccggacaagttttgcttattccagtctgaaaccaaaaaccttctgttcaatgacaacactgagtgtctggccagactccatggcaaaacaacatatgaaaaatatttgggaccacagtatgtcgcaggcattactaatctgaaaaagtgctcaacctcccccctcctggaagcctgtgaattcctcaggaagtaaaaccgaagaagatggcccagctccccaagaaagcctcagccattcactgcccccagctcttctccccaggtgtgttggggccttggctcccctgctgaaggtggggattgcccatccatctgcttacaattccctgctgtcgtcttagcaagaagtaaaatgagaaattttgttgatattcaaaaaaaa

SEQ ID NO: 4196 - DNA, 2500 bp, Homo sapiens; identical to SEQ ID NO: 3751

SEQ ID NO: 4197 - DNA, 3437 bp, Homo sapiens
aagttcagtgcctaccgaagacaaaggcgccccgagggagtggcggtgcgaccccagggcgtgggcccggccgcggagcccacactgcccggctgacccggtggtctcggaccatgtctcccgccccaagacccccccgttgtctcctgctccccctgctcacgctcggcaccgcgctcgcctccctcggctcggcccaaagcagcagcttcagccccgaagcctggctacagcaatatggctacctgcctcccggggacctacgtacccacacacagcgctcaccccagtcactctcagcggccatcgctgccatgcagaagttttacggcttgcaagtaacaggcaaagctgatgcagacaccatgaaggccatgaggcgcccccgatgtggtgttccagacaagtttggggctgagatcaaggccaatgttcgaaggaagcgctacgccatccagggtctcaaatggcaacataatgaaatcactttctgcatccagaattacacccccaaggtgggcgagtatgccacatacgaggccattcgcaaggcgttccgcgtgtgggagagtgccacaccactgcgcttccgcgaggtgccctatgcctacatccgtgagggccatgagaagcaggccgacatcatgatcttctttgccgagggcttccatggcgacagcacgcccttcgatggtgagggcggcttcctggcccatgcctacttcccaggccccaacattggaggagacacccactttgactctgccgagccttggactgtcaggaatgaggatctgaatggaaatgacatcttcctggtggctgtgcacgagctgggccatgccctggggctcgagcattccagtgacccctcggccatcatggcacccttttaccagtggatggacacggagaattttgtgctgcccgatgatgaccgccggggcatccagcaactttatgggggtgagtcagggttccccaccaagatgccccctcaacccaggactacctcccggccttctgttcctgataaacccaaaaaccccacctatgggcccaacatctgtgacgggaactttgacaccgtggccatgctccgaggggagatgtttgtcttcaaggagcgctggttctggcgggtgaggaataaccaagtgatggatggatacccaatgcccattggccagttctggcggggcctgcctgcgtccatcaacactgcctacgagaggaaggatggcaaattcgtcttcttcaaaggagacaagcattgggtgtttgatgaggcgtccctggaacctggctaccccaagcacattaaggagctgggccgagggctgcctaccgacaagattgatgctgctctcttctggatgcccaatggaaagacctacttcttccgtggaaacaagtactaccgtttcaacgaagagctcagggcagtggatagcgagtaccccaagaacatcaaagtctgggaagggatccctgagtctcccagagggtcattcatgggcagcgatgaagtcttcacttacttctacaaggggaacaaatactggaaattcaacaaccagaagctgaaggtagaaccgggctaccccaagtcagccctgagggactggatgggctgcccatcgggaggccggccggatgaggggactgaggaggagacggaggtgatcatcattgaggtggacgaggagggcggcggggcggtgagcgcggctgccgtggtgctgcccgtgctgctgctgctcctggtgctggcggtgggccttgcagtcttcttcttcagacgccatgggacccccaggcgactgctctactgccagcgttccctgctggacaaggtctgacgcccaccgccggcccgcccactcctaccacaaggactttgcctctgaaggccagtggcagcaggtggtggtgggtgggctgctcccatcgtcccgagccccctccccgcagcctccttgcttctctctgtcccctggctggcctccttcaccctgaccgcctccctccctcctgccccggcattgcatcttccctagataggtcccctgagggctgagtgggagggcggccctttccagcctctgcccctcaggggaaccctgtagctttgtgtctgtccagccccatctgaatgtgttgggggctctgcacttgaaggcaggaccctcagacctcgctggtaaaggtcaaatggggtcatctgctccttttccatcccctgacataccttaacctctgaactctgacctcaggaggctctgggcactccagccctgaaagccccaggtgtacccaattggcagcctctcactactctttctggctaaaaggaatctaatcttgttgagggtagagaccctgagacagtgtgagggggtggggactgccaagccaccctaagaccttgggaggaaaactcagagagggtcttcgttgctcagtcagtcaagttcctcggagatctgcctctgcctcacctaccccagggaacttccaaggaaggagcctgagccactggggactaagtgggcagaagaaacccttggcagccctgtgcctctcgaatgttagccttggatggggctttcacagttagaagagctgaaaccaggggtgcagctgtcaggtagggtggggccggtgggagaggcccgggtcagagccctgggggtgagcctgaaggccacagagaaagaaccttgcccaaactcaggcagctggggctgaggcccaaaggcagaacagccagagggggcaggaggggaccaaaaaggaaaatgaggacgtgcagcagcattggaaggctggggccgggcaggccaggccaagccaagcagggggccacagggtgggctgtggagctctcaggaagggccctgaggaaggcacacttgctcctgttggtccctgtccttgctgcccaggcagcgtggaggggaagggtagggcagccagagaaaggagcagagaaggcacacaaacgaggaatgaggggcttcacgagaggccacagggcctggctggccacgctgtcccggcctgctcaccatctcagtgaggggcaggagctggggctcgcttaggctgggtccacgcttccctggtgccagcacccctcaagcctgtctcaccagtggcctgccctctcgctcccccacccagcccacccattgaagtctccttgggccaccaaaggtggtggccatggtaccggggacttgggagagtgagacccagtggagggagcaagaggagagggatgtcgggggggtggggcacggggtaggggaaatggggtgaacggtgctggcagttcggctagatttctgtcttgtttgtttttttgttttgtttaatgtatatttttattataattattatatatgaattccaaaaaaaaaaaaaaaaaaaaa

SEQ ID NO: 4198 - DNA, 3314 bp, Homo sapiens
gaattccggcaggcgcccatggcgggctgagtcctgcccatgccctggtggcctggaagcctgcatgggcgccgtgcaaagatcaacgttttccagaggagcttttgggctcatcactggcctggggagggcttgacacggggttcccacagcttgccccacaccaccttcacacccacacacagcaggtccccgcggggccggtgcaggctgtggctgcccgcgctgcgctgttgctctgtcccggctggctggctccgagtgtggggcgctctgggccggggccgctggggcgcgcacagtggggtgacaggcggcctggctgcagaaacgttgcaccggtgcctgaggtgggaggatgtgatgacgcggcccacgcagcgggaacccaggcctttaaaaagcccaggaaacagcctcagctcaagcggtggctccactggaggaaaacacaccccggtctcacattaaagaagccaaactgtcggcttcaaagagaaaaggcaacatcctgtcacaggccatgctctggcaaaaacccacagctccggagcaagccccagccccggcccggccataccagggcgtccgtgtgaaggagccagtgaaggaactgctgaggaggaagcgaggccacgccagcagtggggcagcacctgcacctacggcggtggtgctgccccatcagcccctggcgacctacaccacagtgggtccttcctgcctggacatggaaggttctgtgtctgcagtgacagaggaggctgccctgtgtgccggctggctctcccagcccaccccggccaccctgcagcccctggccccatggacaccttacaccgagtatgtgccccatgaagctgtcagctgcccctactcagctgacatgtatgtgcagcccgtgtgccccagctacacggtggtggggccctcctcagtgttggcctatgcctctccgccactcatcaccaatgtcacgacaagaagctccgccacgcccgcagtggggcccccgctggagggcccagagcaccaggcacccctcacctatttcccgtggcctcagcccctttccacactacccacctccaccctgcagtaccggcctccggccccagccctacctgggccccagtttgtccagctccccatctctatcccagagccagtccttcaggacatggaagaccccagaagagccgccagctcgttgaccatcgacaagctgcttttggaggaagaggatagcgacgcctatgcgcttaaccacactctctctgtggaaggcttttaggcgtggctcccacctgagtcctgttccctgaaactgggattttaaaatgagcctggaattgagccccaggttcatgcttgtttggagtagtcatttcatgactactctttctacgcacagctagaattgtagacctgtaaaccttccttcccttcttccttcccctccctccctcacttcctccctctcccccatccttccattcttcccctccctcccttcttcctttccaaccccttccttccttttcctccctcccttccttccctccttcccttctccctttccaaccccttccttccttttcctccctcccttccttccctccttcccttctccctttccttctttacctccctccctccctcgcttcttctctctttcttacttcttttttcaattctgttccattttgggaggtaattatagggattttagcaataacattttatgtcaaatgttgccaagtctgtggtccatgggctttcatttctgtcacatttcatttcttggaaaaggcctccttcctccagtgcctgctgaaccatcttagggtcactcacaccctctgtaattttaagatgtatgtggtggccggcgggaagaccagccccgacagcacctcctgagaaagtcagccaagggcctaccctgatgccagagtccttgagctgtcagttcccacagttgctcctttgtttgctcttctcagcctcggccagatttacagtccaggcagcaaaatctcaaggcctggggctcagagtagtaaggggtgggaagtgggtggcagggagaaaagaacatcagggtgggtggggacaggccagtgacgaagagagggacagaggagggatgggaacaggctgtgcatcttagttggagagaggggtgtgggaggaagcttgagtttgatgcagggaggaggaaggctgaggaatgacttggctccagattacttggttattaagaagaacaataaactaaaggaaagcattgcttgaagagatggttttgctgctctccttgaggatacgtgcaagggaagttgggctgttgtaaacagggtgaagggtgtgtttggtcggccatttctctctcacctctaggccctctgctggtgctgtggaggccaagaccccattaagcctaaaggtgatgggtcctcgcctaggcttagtgctaccatgtgggttttgtttctttccttccttccttccttccttccttccttccttccttccttccttccttccttccttccttccttctttccttccttccttccttccttccttcctctctctttctttcttttttttggttttttttgggacggagtctcactccattgcccaggctggagtacaatggtgcgatcttggctcactgcacctctgtctcccaagttcaagtgattctcctgcctgagcctcccgagtagctgggattacaggtgcatgccaccatgcctggctaatttttgtatttttagtagagacggggtttcaccatgttggccaggctggtctcgaactcctgaccttgtgatccgcgcgcctcagcctctcagagtgctgggatcacaggcgtgagccaccgcacccagccttttaccatgtgggtttctttagtgtcttaaaagcgtccataagccaccattctgtggaaccaaggccccctccacgcaaacaccctccctcctggggacctctggagcctcagccagaagtaccattaggtttaattttaatttgttttgctggagaaacatcaggtttgtaggagactgagttgttagcaggtgtgcttagctcttgatagtgaacgtgtaccttgggaactggctcacccacctgctaatagcaccatcgtcactattaagcagacatttcagttggtagaatccatgtagaagtcatggacttttctgggaaatgacttttctgggaaatgacagtttctttgacatattttctttgcccactttaaataaaaactctggagaaaaaaaaaaaaa

SEQ ID NO: 4199 - DNA, 5420 bp, Homo sapiens
ccaagttgaaaacccaaaccaatgcatctgactttcccattgggacatctttaaagtacgaatgccgtcctgagtactacgggaggccattctctatcacatgtctagataacctggtctggtcaagtcccaaagatgtctgtaaacgtaaatcatgtaaaactcctccagatccagtgaatggcatggtgcatgtgatcacagacatccaggttggatccagaatcaactattcttgtactacagggcaccgactcattggtcactcatctgctgaatgtatcctctcgggcaatgctgcccattggagcacgaagccgccaatttgtcaacgaattccttgtgggctaccccccaccatcgccaatggagatttcattagcaccaacagagagaattttcactatggatcagtggtgacctaccgctgcaatcctggaagcggagggagaaaggtgtttgagcttgtgggtgagccctccatatactgcaccagcaatgacgatcaagtgggcatctggagcggcccggcccctcagtgcattatacctaacaaatgcacgcctccaaatgtggaaaatggaatattggtatctgacaacagaagcttattttccttaaatgaagttgtggagtttaggtgtcagcctggctttgtcatgaaaggaccccgccgtgtgaagtgccaggccctgaacaaatgggagccggagctaccaagctgctccagggtatgtcagccacctccagatgtcctgcatgctgagcgtacccaaagggacaaggacaacttttcacccgggcaggaagtgttctacagctgtgagcccggctatgacctcagaggggctgcgtctatgcgctgcacaccccagggagactggagccctgcagcccccacatgtgaagtgaaatcctgtgatgacttcatgggccaacttcttaatggccgtgtgctatttccagtaaatctccagcttggagcaaaagtggattttgtttgtgatgaaggatttcaattaaaaggcagctctgctagttattgtgtcttggctggaatggaaagcctttggaatagcagtgttccagtgtgtgaacaaatcttttgtccaagtcctccagttattcctaatgggagacacacaggaaaacctctggaagtctttccctttggaaaagcagtaaattacacatgcgacccccacccagacagagggacgagcttcgacctcattggagagagcaccatccgctgcacaagtgaccctcaagggaatggggtttggagcagccctgcccctcgctgtggaattctgggtcactgtcaagccccagatcattttctgtttgccaagttgaaaacccaaaccaatgcatctgactttcccattgggacatctttaaagtacgaatgccgtcctgagtactacgggaggccattctctatcacatgtctagataacctggtctggtcaagtcccaaagatgtctgtaaacgtaaatcatgtaaaactcctccagatccagtgaatggcatggtgcatgtgatcacagacatccaggttggatccagaatcaactattcttgtactacagggcaccgactcattggtcactcatctgctgaatgtatcctctcaggcaatactgcccattggagcacgaagccgccaatttgtcaacgaattccttgtgggctacccccaaccatcgccaatggagatttcattagcaccaacagagagaattttcactatggatcagtggtgacctaccgctgcaatcttggaagcagagggagaaaggtgtttgagcttgtgggtgagccctccatatactgcaccagcaatgacgatcaagtgggcatctggagcggccccgcccctcagtgcattatacctaacaaatgcacgcctccaaatgtggaaaatggaatattggtatctgacaacagaagcttattttccttaaatgaagttgtggagtttaggtgtcagcctggctttgtcatgaaaggaccccgccgtgtgaagtgccaggccctgaacaaatgggagccagagttaccaagctgctccagggtgtgtcagccgcctccagaaatcctgcatggtgagcataccccaagccatcaggacaacttttcacctgggcaggaagtgttctacagctgtgagcctggctatgacctcagaggggctgcgtctctgcactgcacaccccagggagactggagccctgaagccccgagatgtgcagtgaaatcctgtgatgacttcttgggtcaactccctcatggccgtgtgctatttccacttaatctccagcttggggcaaaggtgtcctttgtctgtgatgaagggtttcgcttaaagggcagttccgttagtcattgtgtcttggttggaatgagaagcctttggaataacagtgttcctgtgtgtgaacatatcttttgtccaaatcctccagctatccttaatgggagacacacaggaactccctctggagatattccctatggaaaagaaatatcttacacatgtgacccccacccagacagagggatgaccttcaacctcattggggagagcaccatccgctgcacaagtgaccctcatgggaatggggtttggagcagccctgcccctcgctgtgaactttctgttcgtgctggtcactgtaaaaccccagagcagtttccatttgccagtcctacgatcccaattaatgactttgagtttccagtcgggacatctttgaattatgaatgccgtcctgggtattttgggaaaatgttctctatctcctgcctagaaaacttggtctggtcaagtgttgaagacaactgtagacgaaaatcatgtggacctccaccagaacccttcaatggaatggtgcatataaacacagatacacagtttggatcaacagttaattattcttgtaatgaagggtttcgactcattggttccccatctactacttgtctcgtctcaggcaataatgtcacatgggataagaaggcacctatttgtgagatcatatcttgtgagccacctccaaccatatccaatggagacttctacagcaacaatagaacatcttttcacaatggaacggtggtaacttaccagtgccacactggaccagatggagaacagctgtttgagcttgtgggagaacggtcaatatattgcaccagcaaagatgatcaagttggtgtttggagcagccctccccctcggtgtatttctactaataaatgcacagctccagaagttgaaaatgcaattagagtaccaggaaacaggagtttcttttccctcactgagatcatcagatttagatgtcagcccgggtttgtcatggtagggtcccacactgtgcagtgccagaccaatggcagatgggggcccaagctgccacactgctccagggtgtgtcagccgcctccagaaatcctgcatggtgagcataccctaagccatcaggacaacttttcacctgggcaggaagtgttctacagctgtgagcccagctatgacctcagaggggctgcgtctctgcactgcacgccccagggagactggagccctgaagcccctagatgtacagtgaaatcctgtgatgacttcctgggccaactccctcatggccgtgtgctacttccacttaatctccagcttggggcaaaggtgtcctttgtttgcgatgaagggttccgattaaaaggcaggtctgctagtcattgtgtcttggctggaatgaaagccctttggaatagcagtgttccagtgtgtgaacaaatcttttgtccaaatcctccagctatccttaatgggagacacacaggaactccctttggagatattccctatggaaaagaaatatcttacgcatgcgacacccacccagacagagggatgaccttcaacctcattggggagagctccatccgctgcacaagtgaccctcaagggaatggggtttggagcagccctgcccctcgctgtgaactttctgttcctgctgcctgcccacatccacccaagatccaaaacgggcattacattggaggacacgtatctctatatcttcctgggatgacaatcagctacacttgtgaccccggctacctgttagtgggaaagggcttcattttctgtacagaccagggaatctggagccaattggatcattattgcaaagaagtaaattgtagcttcccactgtttatgaatggaatctcgaaggagttagaaatgaaaaaagtatatcactatggagattatgtgactttgaagtgtgaagatgggtatactctggaaggcagtccctggagccagtgccaggcggatgacagatgggaccctcctctggccaaatgtacctctcgtgcacatgatgctctcatagttggcactttatctggtacgatcttctttattttactcatcattttcctctcttggataattctaaagcacagaaaaggcaataatgcacatgaaaaccctaaagaagtggctatccatttacattctcaaggaggcagcagcgttcatccccgaactctgcaaacaaatgaagaaaatagcagggtccttccttgacaaagtactatacagctgaagaacatctcgaatacaattttggtgggaaaggagccaattgatttcaacagaatcagatctgagcttcataaagtctttgaagtgacttcacagagacgcagacatgtgcacttgaagatgctgccccttccctggtacctagcaaagctcctgcctctttgtgtgcgtcactgtgaaacccccacccttctgcctcgtgctaaacgcacacagtatctagtcaggggaaaagactgcatttaggagatagaaaatagtttggattacttaaaggaataaggtgttgcctggaatttctggtttgtaaggtggtcactgttcttttttaaaatatttgtaatatggaatgggctcagtaagaagagcttggaaaatgcagaaagttatgaaaaataagtcacttataattatgctacctactgataaccactcctaatattttgattcattttctgcctatcttctttcacatatgtgtttttttacatacgtacttttccccccttagtttgtttccttttattttatagagcagaaccctagtcttttaaacagtttagagtgaaatatatgctatatcagtttttactttctctagggagaaaaattaatttactagaaaggcatgaaatgatcatgggaagagtggttaagactactgaagagaaatatttggaaaataagatttcgatatcttctttttttttgagatggagtctggctctgtctcccaggctggagtgcagtggcgtaatctcggctcactgcaacgtccgcctcccg

SEQ ID NO: 4200 - DNA, 1885 bp, Homo sapiens; identical to SEQ ID NO: 415

SEQ ID NO: 4201 - DNA, 2244 bp, Homo sapiens
ctgcagacgaggcagggagaggcgggacttcgcgggcgagacgtcatcggggcgccggacgccggggcgcctgggagtttgaagcaaacaggcagcgcgcgacaatggcggtcgctcgtgcagctttggggccattggtgacgggtctgtacgacgtgcaggctttcaagtttggggacttcgtgctgaagagcgggctttcctcccccatctacatcgatctgcggggcatcgtgtctcgaccgcgtcttctgagtcaggttgcagatattttattccaaactgcccaaaatgcaggcatcagttttgacaccgtgtgtggagtgccttatacagctttgccattggctacagttatctgttcaaccaatcaaattccaatgcttattagaaggaaagaaacaaaggattatggaactaagcgtcttgtagaaggaactattaatccaggagaaacctgtttaatcattgaagatgttgtcaccagtggatctagtgttttggaaactgttgaggttcttcagaaggagggcttgaaggtcactgatgccatagtgctgttggacagagagcagggaggcaaggacaagttgcaggcgcacgggatccgcctccactcagtgtgtacattgtccaaaatgctggagattctcgagcagcagaaaaaagttgatgctgagacagttgggagagtgaagaggtttattcaggagaatgtctttgtggcagcgaatcataatggttctcccctttctataaaggaagcacccaaagaactcagcttcggtgcacgtgcagagctgcccaggatccacccagttgcatcgaagcttctcaggcttatgcaaaagaaggagaccaatctgtgtctatctgctgatgtttcactggccagagagctgttgcagctagcagatgctttaggacctagtatctgcatgctgaagactcatgtagatattttgaatgattttactctggatgtgatgaaggagttgataactctggcaaaatgccatgagttcttgatatttgaagaccggaagtttgcagatataggaaacacagtgaaaaagcagtatgaaggaggtatctttaaaatagcttcctgggcagatctagtaaatgctcacgtggtgccaggctcaggagttgtgaaaggcctgcaagaagtgggcctgcctttgcatcgggggtgcctccttattgcggaaatgagctccaccggctccctggccactggggactacactagagcagcggttagaatggctgaggagcactctgaatttgttgttggttttatttctggctcccgagtaagcatgaaaccagaatttcttcacttgactccaggagttcagttggaagcaggaggagataatcttggccaacagtacaatagcccacaagaagttattggcaaacgaggttccgatatcatcattgtaggtcgtggcataatctcagcagctgatcgtctggaagcagcagagatgtacagaaaagctgcttgggaagcgtatttgagtagacttggtgtttgagtgcttcagatacatttttcagatacaatgtgaagacattgaagatatgtggtcctcctgaaagtcactggctggaaataatccaattattcctgcttggattcttccacagggcctgtgtaagaatgggttctggagttctcatggtctttaggaaatattgagtaatttgtaatcaccgcattgatactataataagttcattcttaagcttgctttttttgagactggtgtttgttagacagccacagtcctgtctgggttagggtcttccacatttgaggatccttcctatctctccatgggactagactgctttgttattctatttattttttaatttttttcgagacaggatctcactctgttgcccaggatggagtgcagtggtgagatcacggctcattgcagcctcgacctcccaggtgatcctcccacctcagcttccagattagctggtgctataggcatgcaccaccacgtccatctaaatttctttattatttgtagagatgaggtcttgccatgttacccaggctggtctcaactcctgggctcaagcgatcctcctgcctcagtctctcaaagtgctgggattacaggtgtgagccactgtgcccagcctaattgcagtaagacaaaaattctagggcaccaagaggctaaagtcagcacagcttttcttgtgtcctgtatt

SEQ ID NO: 4202 - DNA, 848 bp, Homo sapiens
cagtctcaatgggggcactggggctggagggcaggggtgggaggctccaggggaggggttccctcctgctagctgtggcaggagccacttctctggtgaccttgttgctggcggtgcctatcactgtcctggctgtgctggccttagtgccccaggatcagggaggactgggtttcagaagctgccagaggaggagccagaaacagatctcagccccgggctcccagctgcccacctcataggcgctccgctgaaggggcaggggctaggctgggagacgacgaaggaacaggcgtttctgacgagcgggacgcagttctcggacgccgaggggctggcgctcccgcaggacggcctctattacctctactgtctcgtcggctaccggggccgggcgccccctggcggcggggacccccagggccgctcggtcacgctgcgcagctctctgtaccgggcggggggcgcctacgggccgggcactcccgagctgctgctcgagggcgccgagacggtgactccagtgctggacccggccaggagacaagggtacgggcctctctggtacacgagcgtggggttcggcggcctggtgcagctccggaggggcgagagggtgtacgtcaacatcagtcaccccgatatggtggacttcgcgagagggaagaccttctttggggccgtgatggtggggtgagggaatatgagtgcgtggtgcgagtgcgtgaatattgggggcccggacgcccaggaccccatggcagtgggaaaaatgtaggagactgtttggaaattgattttgaacctgatgaaaataaagaatggaaagcttcagtgctgccgataaa

SEQ ID NO: 4203 - DNA, 1266 bp, Homo sapiens
gaattccaataaatgtgaatgttggaccccaaatgattataagcacaccacagagactaaccagttcaggaagtgttctgattgggagtccatatacccctgcaccagcaatggttactcagacacacatagcagaagctactggctgggtccctggtgatagaaaacgggctagaaaatttatagactctgatttttcagaaagtaaacgaagcaaaaaaggagataaaaatgggaaaggcttgagacacttttcaatgaaagtgtgtgagaaagttcaacgaaaaggtacaacatcgtacaatgaagtcgctgatgagctggtgtcagagttcaccaattcaaataaccatttggctgctgattcggcttatgatcagaagaacattaggcgaagagtttatgatgctttaaatgtgctaatggcaatgaacataatttcaaaggaaaaaaaagaaatcaagtggattggcctgcctaccaattctgctcaggaatgtcagaatctggagatagagaagcagaggcggatagaacggataaagcagaagcgggcccagctgcaagaacttctcctacagcaaatcgctttcaaaaacctggtacagagaaatcgacaaaatgagcagcaaaaccagggcccgccggctctgaactctaccattcagctgccattcataatcatcaatacaagcagaaaaacagtcatagattgcagcatctccagtgacaagtttgagtatcttttcaattttgacaacacctttgagatccatgatgacatagaagtactaaagcggatgggaatgtcgtttggcctggagtcaggcaaatgctctctggaggatctgaaacttgcgaaatccctggtgccaaaggctttagaaggttatatcacagatatctccacaggaccttcttggttaaatcagggactacttctgaactctacccaatcagtttcaaatttagacctgaccactggtgccaccttaccccagtcaagtgtaaaccaagggttatgcttggatgcagaagtggccttagcaactgggcagttcctggccccaaacagtcaccagtccagcagtgcggcctctcactgctccgagtcccgaggcgagaccccctgttcgttcaatgatgaagatgaggaagatgatgaggaggattcctcctccccagaataaagacaagagaaagcctaaaaaaaaaaaaaaaaaaaaaaaaaaaaaaaaaaaaaaaaaaaaaaatctagggaattcc

SEQ ID NO: 4204 - DNA, 193 bp, Homo sapiens
acagcttaggtgtgtctttctgtcttctacaggccttcctggaaaacgaggatctgggaaactcactgggcagtgcagaagcccttcttcagaagcatgaagactttgaggaagcctttactgcccaggaagagaagatcatagtaagaaattggccctagtttgggcattggctccctctctgtatacataa

SEQ ID NO: 4205 - DNA, 3291 bp, Homo sapiens
accgggcaagcgggaaccaggtggccacccggtgtcggtttcattttcctttggaatttctgctttacagacagaacaatggcagcccgagtacttataattggcagtggaggaagggaacatacgctggcctggaaacttgcacagtctcatcatgtcaaacaagtgttggttgccccaggaaacgcaggcactgcctgctctgaaaagatttcaaataccgccatctcaatcagtgaccacactgcccttgctcaattctgcaaagagaagaaaattgaatttgtagttgttggaccagaagcacctctggctgctgggattgttgggaacctgaggtctgcaggagtgcaatgctttggcccaacagcagaagcggctcagttagagtccagcaaaaggtttgccaaagagtttatggacagacatggaatcccaaccgcacaatggaaggctttcaccaaacctgaagaagcctgcagcttcattttgagtgcagacttccctgctttggttgtgaaggccagtggtcttgcagctggaaaaggggtgattgttgcaaagagcaaagaagaggcctgcaaagctgtacaagagatcatgcaggagaaagcctttggggcagctggagaaacaattgtcattgaagaacttcttgacggagaagaggtgtcgtgtctgtgtttcactgatggcaagactgtggcccccatgcccccagcacaggaccataagcgattactggagggagatggtggccctaacacagggggaatgggagcctattgtccagcccctcaggtttctaatgatctattactaaaaattaaagatactgttcttcagaggacagtggatggcatgcagcaagagggtactccatatacaggtattctctatgctggaataatgctgaccaagaatggcccaaaagttctagagtttaattgccgttttggtgatccagagtgccaagtaatcctcccacttcttaaaagtgatctttatgaagtgattcagtccaccttagatggactgctctgcacatctctgcctgtttggctagaaaaccacaccgccctaactgttgtcatggcaagtaaaggttatcctggagactacaccaagggtgtagagataacagggtttcctgaggctcaagctctaggactggaggtgttccatgcaggcactgccctcaaaaatggcaaagtagtaactcatgggggtagagttcttgcagtcacagccatccgggaaaatctcatatcagcccttgaggaagccaagaaaggactagctgctataaagtttgagggagcaatttataggaaagacgtcggctttcgtgccatagctttcctccagcagcccaggagtttgacttacaaggaatctggagtagatatcgcagctggaaatatgctggtcaagaaaattcagcctttagcaaaagccacttccagatcaggctgtaaagttgatcttggaggttttgctggtctttttgatttaaaagcagctggtttcaaagatccccttctggcctctggaacagatggcgttggaactaaactaaagattgcccagctatgcaataaacatgataccattggtcaagatttggtagcaatgtgtgttaatgatattctggcacaaggagcagagcccctcttcttccttgattacttttcctgtggaaaacttgacctcagtgtaactgaagctgttgttgctggaattgctaaagcttgtggaaaagctggatgtgctctccttggaggtgaaacagcagaaatgcctgacatgtatccccctggagagtatgacctagctgggtttgccgttggtgccatggagcgagatcagaaactccctcacctggaaagaatcactgagggtgatgttgttgttggaatagcttcatctggtcttcatagcaatggatttagccttgtgaggaaaatcgttgcaaaatcttccctccagtactcctctccagcacctgatggttgtggtgaccagactttaggggacttacttctcacgcctaccagaatctacagccattcactgttacctgtcctacgttcaggacatgtcaaagcctttgcccatattactggtggaggattactagagaacatccccagagtcctccctgagaaacttggggtagatttagatgcccagacctggaggatccccagggttttctcatggttgcagcaggaaggacacctctctgaggaagagatggccagaacatttaactgtggggttggcgctgtccttgtggtatcaaaggagcagacagagcagattctgagggatatccagcagcacaaggaagaagcctgggtgattggcagtgtggttgcacgagctgaaggttccccacgtgtgaaagtcaagaatctgattgaaagcatgcaaataaatgggtcagtgttgaagaatggctccctgacaaatcatttctcttttgaaaaaaaaaaggccagagtggctgtcttaatatctggaacaggatcgaacctgcaagcacttatagacagtactcgggaaccaaatagctctgcacaaattgatattgttatctccaacaaagccgcagtagctgggttagataaagcggaaagagctggtattcccactagagtaattaatcataaactgtataaaaatcgtgtagaatttgacagtgcaattgacctagtccttgaagagttctccatagacatagtctgtcttgcaggattcatgagaattctttctggcccctttgtccaaaagtggaatggaaaaatgctcaatatccacccatccttgctcccttcttttaagggttcaaatgcccatgagcaagccctggaaaccggagtcacagttactgggtgcactgtacactttgtagctgaagatgtggatgctggacagattattttgcaagaagctgttcccgtgaagaggggtgatactgtcgcaactctttctgaaagagtaaaattagcagaacataaaatatttcctgcagcccttcagctggtggccagtggaactgtacagcttggagaaaatggcaagatctgttgggttaaagaggaatgaagccttttaattcagaaatggggccagtttagaaagaattatttgctgtttgcatggtggttttttatcatggacttggcccaaaagaaaaactgctaaaagacaaaaaagacctcacccttacttcatctatttttttaataaatagagactcactaaaaaaaaaaaaaaaaaaaaaaa

SEQ ID NO: 4206 - DNA, 7364 bp, Homo sapiens
gcggcggcggctgcggcggtggggccgggcgaggtccgctgcggtcccggcggctccgtggctgctccgctctgagcgcctggcgcgccccgcgccctccctgccggggccgctgggccggggatgcacgcggggcccgggagccatggtccgcttcggggacgagctgggcggccgctatggaggccccggcggcggagagcgggcccggggcggcggggccggcggggcggggggcccgggtcccggggggctgcagcccggccagcgggtcctctacaagcaatcgatcgcgcagcgcgcgcggaccatggcgctgtacaaccccatcccggtcaagcagaactgcttcaccgtcaaccgctcgctcttcgtcttcagcgaggacaacgtcgtccgcaaatacgcgaagcgcatcaccgagtggcctccattcgagtatatgatcctggccaccatcatcgccaactgcatcgtgctggccctggagcagcacctccctgatggggacaaaacgcccatgtccgagcggctggacgacacggagccctatttcatcgggatcttttgcttcgaggcagggatcaaaatcatcgctctgggctttgtcttccacaagggctcttacctgcggaacggctggaacgtcatggacttcgtggtcgtcctcacagggatccttgccacggctggaactgacttcgacctgcgaacactgagggctgtgcgtgtgctgaggcccctgaagctggtgtctgggattccaagtttgcaggtggtgctcaagtccatcatgaaggccatggttccactcctgcagattgggctgcttctcttctttgccatcctcatgtttgccatcattggcctggagttctacatgggcaagttccacaaggcctgtttccccaacagcacagatgcggagcccgtgggtgacttcccctgtggcaaggaggccccagcccggctgtgcgagggcgacactgagtgccgggagtactggccaggacccaactttggcatcaccaactttgacaatatcctgtttgccatcttgacggtgttccagtgcatcaccatggagggctggactgacatcctctataatacaaacgatgcggccggcaacacctggaactggctctacttcatccctctcatcatcatcggctccttcttcatgctcaacctggtgctgggcgtgctctcgggggagtttgccaaggagcgagagagggtggagaaccgccgcgccttcctgaagctgcgccggcagcagcagatcgagcgagagctcaacgggtacctggagtggatcttcaaggcggaggaagtcatgctggccgaggaggacaggaatgcagaggagaagtcccctttggacgtgctgaagagagcggccaccaagaagagcagaaatgacctgatccacgcagaggagggagaggaccggtttgcagatctctgtgctgttggatcccccttcgcccgcgccagcctcaagagcgggaagacagagagctcgtcatacttccggaggaaggagaagatgttccggttttttatccggcgcatggtgaaggctcagagcttctactgggtggtgctgtgcgtggtggccctgaacacactgtgtgtggccatggtgcattacaaccagccgcggcggcttaccacgaccctgtattttgcagagtttgttttcctgggtctcttcctcacagagatgtccctgaagatgtatggcctggggcccagaagctacttccggtcctccttcaactgcttcgactttggggtcatcgtggggagcgtctttgaagtggtctgggcggccatcaagccgggaagctcctttgggatcagtgtgctgcgggccctccgcctgctgaggatcttcaaagtcacgaagtactggagctccctgcggaacctggtggtgtccctgctgaactccatgaagtccatcatcagcctgctcttcttgctcttcctgttcattgtggtcttcgccctgctggggatgcagctgtttgggggacagttcaacttccaggatgagactcccacaaccaacttcgacaccttccctgccgccatcctcactgtcttccagatcctgacgggagaggactggaatgcagtgatgtatcacgggatcgaatcgcaaggcggcgtcagcaaaggcatgttctcgtccttttacttcattgtcctgacactgttcggaaactacactctgctgaatgtctttctggccatcgctgtggacaacctggccaacgcccaagagctgaccaaggatgaagaggagatggaagaagcagccaatcagaagcttgctctgcaaaaggccaaagaagtggctgaagtcagccccatgtctgccgcgaacatctccatcgccgccaggcagcagaactcggccaaggcgcgctcggtgtgggagcagcgggccagccagctacggctgcagaacctgcgggccagctgcgaggcgctgtacagcgagatggaccccgaggagcggctgcgcttcgccactacgcgccacctgcggcccgacatgaagacgcacctggaccggccgctggtggtggagctgggccgcgacggcgcgcgggggcccgtgggaggcaaagcccgacctgaggctgcggaggcccccgagggcgtcgaccctccgcgcaggcaccaccggcaccgcgacaaggacaagacccccgcggcgggggaccaggaccgagcagaggccccgaaggcggagagcggggagcccggtgcccgggaggagcggccgcggccgcaccgcagccacagcaaggaggccgcggggcccccggaggcgcggagcgagcgcggccgaggcccaggccccgagggcggccggcggcaccaccggcgcggctccccggaggaggcggccgagcgggagccccgacgccaccgcgcgcaccggcaccaggatccgagcaaggagtgcgccggcgccaagggcgagcggcgcgcgcggcaccgcggcggcccccgagcggggccccgggaggcggagagcggggaggagccggcgcggcggcaccgggcccggcacaaggcgcagcctgctcacgaggctgtggagaaggagaccacggagaaggaggccacggagaaggaggctgagatagtggaagccgacaaggaaaaggagctccggaaccaccagccccgggagccacactgtgacctggagaccagtgggactgtgactgtgggtcccatgcacacactgcccagcacctgtctccagaaggtggaggaacagccagaggatgcagacaatcagcggaacgtcactcgcatgggcagtcagcccccagacccgaacactattgtacatatcccagtgatgctgacgggccctcttggggaagccacggtcgttcccagtggtaacgtggacctggaaagccaagcagaggggaagaaggaggtggaagcggatgacgtgatgaggagcggcccccggcctatcgtcccatacagctccatgttctgtttaagccccaccaacctgctccgccgcttctgccactacatcgtgaccatgaggtacttcgaggtggtcattctcgtggtcatcgccttgagcagcatcgccctggctgctgaggacccagtgcgcacagactcgcccaggaacaacgctctgaaatacctggattacattttcactggtgtctttacctttgagatggtgataaagatgatcgacttgggactgctgcttcaccctggagcctatttccgggacttgtggaacattctggacttcattgtggtcagtggcgccctggtggcgtttgctttctcaggatccaaagggaaagacatcaataccatcaagtctctgagagtccttcgtgtcctgcggcccctcaagaccatcaaacggctgcccaagctcaaggctgtgtttgactgtgtggtgaactccctgaagaatgtcctcaacatcttgattgtctacatgctcttcatgttcatatttgccgtcattgcggtgcagctcttcaaagggaagtttttctactgcacagatgaatccaaggagctggagagggactgcaggggtcagtatttggattatgagaaggaggaagtggaagctcagcccaggcagtggaagaaatacgactttcactacgacaatgtgctctgggctctgctgacgctgttcacagtgtccacgggagaaggctggcccatggtgctgaaacactccgtggatgccacctatgaggagcagggtccaagccctgggtaccgcatggagctgtccatcttctacgtggtctactttgtggtctttcccttcttcttcgtcaacatctttgtggctttgatcatcatcaccttccaggagcagggggacaaggtgatgtctgaatgcagcctggagaagaacgagagggcttgcattgacttcgccatcagcgccaaacccctgacacggtacatgccccaaaaccggcagtcgttccagtataagacgtggacatttgtggtctccccgccctttgaatacttcatcatggccatgatagccctcaacactgtggtgctgatgatgaagttctatgatgcaccctatgagtacgagctgatgctgaaatgcctgaacatcgtgttcacatccatgttctccatggaatgcgtgctgaagatcatcgcctttggggtgctgaactatttcagagatgcctggaatgtctttgactttgtcactgtgttgggaagtattactgatattttagtaacagagattgcggaaacgaacaatttcatcaacctcagcttcctccgcctctttcgagctgcgcggctgatcaagctgctccgccagggctacaccatccgcatcctgctgtggacctttgtccagtccttcaaggccctgccctacgtgtgtctgctcattgccatgctgttcttcatctacgccatcatcggcatgcaggtgtttgggaatattgccctggatgatgacaccagcatcaaccgccacaacaacttccggacgtttttgcaagccctgatgctgctgttcaggagcgccacgggggaggcctggcacgagatcatgctgtcctgcctgagcaaccaggcctgtgatgagcaggccaatgccaccgagtgtggaagtgactttgcctacttctacttcgtctccttcatcttcctgtgctcctttctgatgttgaacctctttgtggctgtgatcatggacaattttgagtacctcacgcgggactcttccatcctaggtcctcaccacttggatgagttcatccgggtctgggctgaatacgacccggctgcgtgtgggcgcatcagttacaatgacatgtttgagatgctgaaacacatgtccccgcctctggggctggggaagaaatgccctgctcgagttgcttacaagcgcctggttcgcatgaacatgcccatctccaacgaggacatgactgttcacttcacgtccacgctgatggccctcatccggacggcactggagatcaagctggccccagctgggacaaagcagcatcagtgtgacgcggagttgaggaaggagatttccgttgtgtgggccaatctgccccagaagactttggacttgctggtaccaccccataagcctgatgagatgacagtggggaaggtttatgcagctctgatgatatttgacttctacaagcagaacaaaaccaccagagaccagatgcagcaggctcctggaggcctctcccagatgggtcctgtgtccctgttccaccctctgaaggccaccctggagcagacacagccggctgtgctccgaggagcccgggttttccttcgacagaagagttccacctccctcagcaatggcggggccatacaaaaccaagagagtggcatcaaagagtctgtctcctggggcactcaaaggacccaggatgcaccccatgaggccaggccacccctggagcgtggccactccacagagatccctgtggggcggtcaggagcactggctgtggacgttcagatgcagagcataacccggaggggccctgatggggagccccagcctgggctggagagccagggtcgagcggcctccatgccccgccttgcggccgagactcagcccgtcacagatgccagccccatgaagcgctccatctccacgctggcccagcggccccgtgggactcatctttgcagcaccaccccggaccgcccaccccctagccaggcgtcgtcgcaccaccaccaccaccgctgccaccgccgcagggacaggaagcagaggtccctggagaaggggcccagcctgtctgccgatatggatggcgcaccaagcagtgctgtggggccggggctgcccccgggagaggggcctacaggctgccggcgggaacgagagcgccggcaggagcggggccggtcccaggagcggaggcagccctcatcctcctcctcggagaagcagcgcttctactcctgcgaccgctttgggggccgtgagcccccgaagcccaagccctccctcagcagccacccaacgtcgccaacagctggccaggagccgggaccccacccacagggcagtggttccgtgaatgggagccccttgctgtcaacatctggtgctagcacccccggccgcggtgggcggaggcagctcccccagacgcccctgactccccgccccagcatcacctacaagacggccaactcctcacccatccacttcgccggggctcagaccagcctccctgccttctccccaggccggctcagccgtgggctttccgaacacaacgccctgctgcagagagaccccctcagccagcccctggcccctggctctcgaattggctctgacccttacctggggcagcgtctggacagtgaggcctctgtccacgccctgcctgaggacacgctcactttcgaggaggctgtggccaccaactcgggccgctcctccaggacttcctacgtgtcctccctgacctcccagtctcaccctctccgccgcgtgcccaacggttaccactgcaccctgggactcagctcgggtggccgagcacggcacagctaccaccaccctgaccaagaccactggtgctagctgcaccgtgaccgctcagacgcctgcatgcagcaggcgtgtgttccagtggatgagttttatcatccacacggggcagtcggccctcgggggaggccttgcccaccttggtgaggctcctgtggcccctccctccccctcctcccctcttttactctagacgacgaataaagccctgttgcttgagtgtacgtaccgc

SEQ ID NO: 4207 - DNA, 2051 bp, Homo sapiens
gggcggggttcctggtccctggagctccgcacttggcggcgcaacctgcgtgaggcagcgcgactctggcgactggccggccatgccttcccgggctgaggactatgaagtgttgtacaccattggcacaggctcctacggccgctgccagaagatccggaggaagagtgatggcaagatattagtttggaaagaacttgactatggctccatgacagaagctgagaaacagatgcttgtttctgaagtgaatttgcttcgtgaactgaaacatccaaacatcgttcgttactatgatcggattattgaccggaccaatacaacactgtacattgtaatggaatattgtgaaggaggggatctggctagtgtaattacaaagggaaccaaggaaaggcaatacttagatgaagagtttgttcttcgagtgatgactcagttgactctggccctgaaggaatgccacagacgaagtgatggtggtcataccgtattgcatcgggatctgaaaccagccaatgttttcctggatggcaagcaaaacgtcaagcttggagactttgggctagctagaatattaaaccacgacacgagttttgcaaaaacatttgttggcacaccttattacatgtctcctgaacaaatgaatcgcatgtcctacaatgagaaatcagatatctggtcattgggctgcttgctgtatgagttatgtgcattaatgcctccatttacagcttttagccagaaagaactcgctgggaaaatcagagaaggcaaattcaggcgaattccataccgttactctgatgaattgaatgaaattattacgaggatgttaaacttaaaggattaccatcgaccttctgttgaagaaattcttgagaaccctttaatagcagatttggttgcagacgagcaaagaagaaatcttgagagaagagggcgacaattaggagagccagaaaaatcgcaggattccagccctgtattgagtgagctgaaactgaaggaaattcagttacaggagcgagagcgagctctcaaagcaagagaagaaagattggagcagaaagaacaggagctttgtgttcgtgagagactagcagaggacaaactggctagagcagaaaatctgttgaagaactacagcttgctaaaggaacggaagttcctgtctctggcaagtaatccagaacttcttaatcttccatcctcagtaattaagaagaaagttcatttcagtggggaaagtaaagagaacatcatgaggagtgagaattctgagagtcagctcacatctaagtccaagtgcaaggacctgaagaaaaggcttcacgctgcccagctgcgggctcaagccctgtcagatattgagaaaaattaccaactgaaaagcagacagatcctgggcatgcgctagccaggtagagagacacagagctgtgtacaggatgtaatattaccaacctttaaagactgatattcaaatgctgtagtgttgaatacttggttccatgagccatgcctttctgtatagtacacatgatatttcggaattggttttactgttcttcagcaactattgtacaaaatgttcacatttaatttttctttcttcttttaagaacatattataaaaagaatactttcttggttgggcttttaatcctgtgtgtgattactagtaggaacatgagatgtgacattctaaatcttgggagaaaaaataatgttagaaaaaaaatatttatgcaggaaggtagcactcactgaatagttttaaatgactgagtggtatgcttacaattgtcatgtctagatttaaattttaagtctgagattttaaatgtttttgagcttagaaaacccagttagatgcaatttggtcattaataccatgacatcttgcttataaatattccattgctctgtagttcaaatctgttagctttgtgaaaattcatcactgtgatgtttgtattctttttttttttctgtttaacagatatgagctgtctgtcatttacctacttctttcccactaaataaaa

SEQ ID NO: 4208 - DNA, 4543 bp, Homo sapiens
tgatgaggctgtgtgcttctgagctgggcatccgaaggcatccttggggaagctgagggcacgaggaggggctgccagactccgggagctgctgcctggctgggattcctacacaatgcgttgcctggctccacgccctgctgggtcctacctgtcagagccccaaggcagctcacagtgtgccaccatggagttggggcccctagaaggtggctacctggagcttcttaacagcgatgctgaccccctgtgcctctaccacttctatgaccagatggacctggctggagaagaagagattgagctctactcagaacccgacacagacaccatcaactgcgaccagttcagcaggctgttgtgtgacatggaaggtgatgaagagaccagggaggcttatgccaatatcgcggaactggaccagtatgtcttccaggactcccagctggagggcctgagcaaggacattttcaagcacataggaccagatgaagtgatcggtgagagtatggagatgccagcagaagttgggcagaaaagtcagaaaagacccttcccagaggagcttccggcagacctgaagcactggaagccagctgagccccccactgtggtgactggcagtctcctagtgggaccagtgagcgactgctccaccctgccctgcctgccactgcctgcgctgttcaaccaggagccagcctccggccagatgcgcctggagaaaaccgaccagattcccatgcctttctccagttcctcgttgagctgcctgaatctccctgagggacccatccagtttgtccccaccatctccactctgccccatgggctctggcaaatctctgaggctggaacaggggtctccagtatattcatctaccatggtgaggtgccccaggccagccaagtaccccctcccagtggattcactgtccacggcctcccaacatctccagaccggccaggctccaccagccccttcgctccatcagccactgacctgcccagcatgcctgaacctgccctgacctcccgagcaaacatgacagagcacaagacgtcccccacccaatgcccggcagctggagaggtctccaacaagcttccaaaatggcctgagccggtggagcagttctaccgctcactgcaggacacgtatggtgccgagcccgcaggcccggatggcatcctagtggaggtggatctggtgcaggccaggctggagaggagcagcagcaagagcctggagcgggaactggccaccccggactgggcagaacggcagctggcccaaggaggcctggctgaggtgctgttggctgccaaggagcaccggcggccgcgtgagacacgagtgattgctgtgctgggcaaagctggtcagggcaagagctattgggctggggcagtgagccgggcctgggcttgtggccggcttccccagtacgactttgtcttctctgtcccctgccattgcttgaaccgtccgggggatgcctatggcctgcaggatctgctcttctccctgggcccacagccactcgtggcggccgatgaggttttcagccacatcttgaagagacctgaccgcgttctgctcatcctagacgccttcgaggagctggaagcgcaagatggcttcctgcacagcacgtgcggaccggcaccggcggagccctgctccctccgggggctgctggccggccttttccagaagaagctgctccgaggttgcaccctcctcctcacagcccggccccggggccgcctggtccagagcctgagcaaggccgacgccctatttgagctgtccggcttctccatggagcaggcccaggcatacgtgatgcgctactttgagagctcagggatgacagagcaccaagacagagccctgacgctcctccgggaccggccacttcttctcagtcacagccacagccctactttgtgccgggcagtgtgccagctctcagaggccctgctggagcttggggaggacgccaagctgccctccacgctcacgggactctatgtcggcctgctgggccgtgcagccctcgacagcccccccggggccctggcagagctggccaagctggcctgggagctgggccgcagacatcaaagtaccctacaggaggaccagttcccatccgcagacgtgaggacctgggcgatggccaaaggcttagtccaacacccaccgcgggccgcagagtccgagctggccttccccagcttcctcctgcaatgcttcctgggggccctgtggctggctctgagtggcgaaatcaaggacaaggagctcccgcagtacctagcattgaccccaaggaagaagaggccctatgacaactggctggagggcgtgccacgctttctggctgggctgatcttccagcctcccgcccgctgcctgggagccctactcgggccatcggcggctgcctcggtggacaggaagcagaaggtgcttgcgaggtacctgaagcggctgcagccggggacactgcgggcgcggcagctgcttgagctgctgcactgcgcccacgaggccgaggaggctggaatttggcagcacgtggtacaggagctccccggccgcctctcttttctgggcacccgcctcacgcctcctgatgcacatgtactgggcaaggccttggaggcggcgggccaagacttctccctggacctccgcagcactggcatttgcccctctggattggggagcctcgtgggactcagctgtgtcacccgtttcagggctgccttgagcgacacggtggcgctgtgggagtccctgcggcagcatggggagaccaagctacttcaggcagcagaggagaagttcaccatcgagcctttcaaagccaagtccctgaaggatgtggaagacctgggaaagcttgtgcagactcagaggacgagaagttcctcggaagacacagctggggagctccctgctgttcgggacctaaagaaactggagtttgcgctgggccctgtctcaggcccccaggctttccccaaactggtgcggatcctcacggccttttcctccctgcagcatctggacctggatgcgctgagtgagaacaagatcggggacgagggtgtctcgcagctctcagccaccttcccccagctgaagtccttggaaaccctcaatctgtcccagaacaacatcactgacctgggtgcctacaaactcgccgaggccctgccttcgctcgctgcatccctgctcaggctaagcttgtacaataactgcatctgcgacgtgggagccgagagcttggctcgtgtgcttccggacatggtgtccctccgggtgatggacgtccagtacaacaagttcacggctgccggggcccagcagctcgctgccagccttcggaggtgtcctcatgtggagacgctggcgatgtggacgcccaccatcccattcagtgtccaggaacacctgcaacaacaggattcacggatcagcctgagatgatcccagctgtgctctggacaggcatgttctctgaggacactaaccacgctggaccttgaactgggtacttgtggacacagctcttctccaggctgtatcccatgaggcctcagcatcctggcacccggcccctgctggttcagggttggcccctgcccggctgcggaatgaaccacatcttgctctgctgacagacacaggcccggctccaggctcctttagcgcccagttgggtggatgcctggtggcagctgcggtccacccaggagccccgaggccttctctgaaggacattgcggacagccacggccaggccagagggagtgacagaggcagccccattctgcctgcccaggcccctgccaccctggggagaaagtacttctttttttttatttttagacagagtctcactgttgcccaggctggcgtgcagtggtgcgatctgggttcactgcaacctccgcctcttgggttcaagcgattcttctgcttcagcctcccgagtagctgggactacaggcacccaccatcatgtctggctaatttttcatttttagtagagacagggttttgccatgttggccaggctggtctcaaactcttgacctcaggtgatccacccacctcagcctcccaaagtgctggggattacaagcgtgagccactgcaccgggccacagagaaagtacttctccaccctgctctccgaccagacaccttgacagggcacaccgggcactcagaagacactgatgggcaacccccagcctgctaattccccagattgcaacaggctgggcttcagtggcaggctgcttttgtctatgggactcaatgcactgacattgttggccaaagccaaagctaggcctggccagatgcaccaggcccttagcagggaaacagctaatgggacactaatggggcggtgagaggggaacagactggaagcacagcttcatttcctgtgtcttttttcactacattataaatgtctctttaatgtcacaaaaaaaaaaaaaaaaaaaaaaa

SEQ ID NO: 4209 - DNA, 3131 bp, Homo sapiens
tgccagcgggtcgcaccggctagctggctgccagagcctctgaggcagcgcaggggtcagttcccacccccacccgtcccaggcccaggccgaagccagcgcccagctttcctcactgttcctgtggaggatgtctacgcccaggcgagctcctcgacctctgagggaccatctccccgaccactgcccagccctctgctccctccccagaggaggcgggagggtgggctctatattttcattccaaataaaattctctttctaaaagccaggctgacctgctgctgcaagggtggggctgagaagtctggaaacctggagacagaggatgtcacaggagtcacacatgtgcagaaggtctgggggcagtgagcagccccacaggcattgctcccctggattgtcaggcagggaaactgaggcagaagacctgagaacacatgcaaggctgcatccagcttcaagttggtgctgcttcttccttggaggacaggcccggcagcccagcctcctccagagagactggggagggtctggtgtggaccaggggtcctgcagcagggaggggcaggtggggtatgtgggcaggaagcggaagcctgggccacccttcactgcagacgagcactgagctcacttctcgctcgacacagccagagctggaggtgggtgcccggcacggaggggcctgcggaccaatggtaagcctcggagccccccgggttcttgggatgggggccacaggcggtcggggctagaatgtctgggcctgtggagctaaggagggccccacattggccccagggaagaggtgagacctaagaggagtatggcagaggctgaacctttctctcacctgagctgggctccctgggactccaggcctggcccccagcaccccataccggaccaggcccctgtcaggagccctgggaaggcccttacctggtcttcctgtgagcgggaacttgcattcctggagcctgggcggacagcctggggtggtgggggaggctggctgcacctcagcacccctcccccgacaccccccacctagcctgttccgaccgcagacttcctctggcagctgcgcccgcctcccccagccccccccagcccccggccctgcacgcctgtggccctcagggactgggagtggaacggaaaccctgccgctggggcagccccgtggtggggagggaggaagaggggcctcacggacccccgtttggggacctggccaagcagaagatgagcagttgcctctgggtgcatccaggcccctccatcccccatcccaggcctcagggagagccagccctgacaccagctagcaacctccttccctccctcccatctcctctcccacccacccaggcagcctagacacatttaatccatacttattgagcacctactaacatgcttgacccaaaaagcccccgtttcctagcagcttattgtggggggtagataagacaatagacataaaaaatgagtacagttatctcctgcgttaggtgacatggaaggaaaaaggcactgagtgctggggggtgctggggtgggctgcagtgatagacatcagggtagaggttaaggtcaggttcagcctcactggggtgaagtttgagcacggtgagcaggccatgcagcccgggggaggggaggatgggaggaggtggagctttccgggcagagggaacagccagtgcgaaggccccaggcaggtggcttaatgcagctgttgggggaggtgagtggtagggaggaggctggagggatgggggctgatctcacagggccagagcctggttgaccaaataaggccttggccttttctgcttggctgtcccaagaggatcccaaagagaaaaaaacgaaagtggtcttggtcacccagcctgccccacaccaggccccaccccaggtgctgagccctctgagcccctgcctgtctcccacaggctctgccctgcaccttagggctcgggatgctgctggccctgccaggggccttgggctcgggtggcagcgcggaggacagcgtgggctccagctctgtcaccgttgtcctgctgctgctgctgctcctactgctggccactggcctagcactggcctggcgccgcctcagccgtgactcagggggctactaccacccggcccgcctaggtgccgcgctgtggggccgcacgcggcgcctgctctgggccagccccccaggtcgctggctgcaggcccgagctgagctggggtccacagacaatgaccttgagcgacaggaggatgagcaggacacagactatgaccacgtcgcggatggtggcctgcaggctgaccctggggaaggcgagcagcaatgtggagaggcgtccagcccagagcaggtccccgtgcgggctgaggaagccagagacagtgacacggagggcgacctggtcctcggctccccaggaccagcgagcgcagggggcagtgctgaggccctgctgagtgacctgcacgcctttgctggcagcgcagcctgggatgacagcgccagggcagctgggggccagggcctccatgtcaccgcactgtagaggccggtcttggtgtcccatccctgtcacagccgctcactccccgtgcctctgcttcccaagatgccatggctggactggacccccagcccacatgaccatgcctcagactgtcaccccctaccagttcccaagtccatgtgtaccccgctcaccacgggaacggccccccccaaccacaggcatcaggcaaccatttgaaataaaactccttcagcctgtggccctgtggtcctacagagacccctccctcctggaccaggggctcctcctggcacaatccaacccaaccctgcccctaggcatgcagcacaaagagccaggtcagcaccatgattcagccctttaatcttccacgggagcagttgagcgcggggcgtggcgggcggccctccgtgcccatgattcaggggcacagctgccccagcagacacacactttcatacgcactcacaccccacccccagacacacccccaggtctctggaactggcccagggtcctgctgctctcacagccgcaggacagggctcaagggctaccctc

SEQ ID NO: 4210 - DNA, 505 bp, Homo sapiens
atgaaacacctgtggttcttcctcctcctggtggcagctcccagatgtgagtgtctcaggaatgcggatatgaagatatgagatgctgcctctgatcccagggctcactgtgggtttctctgttcacaggggtcctgtcccaggtgcagctacagcagtggggcgcaggactgttgaagccttcggagaccctgtccctcacctgcgctgtctatggtgggtccttcagtggttactactggagctggatccgccagcccccagggaaggggctggagtggattggggaaatcaatcatagtggaagcaccaactacaacccgtccctcaagagtcgagtcaccatatcagtagacacgtccaagaaccagttctccctgaagctgagctctgtgaccgccgcggacacggctgtgtattactgtgcgagagccggggcctaatagtgggagctactactgcttttgatatctggggccaagggacaatggtcaccgtctcctca

SEQ ID NO: 4211 - DNA, 847 bp, Homo sapiens; identical to SEQ ID NO: 2766

SEQ ID NO: 4212 - DNA, 1636 bp, Homo sapiens
gaattccggctctctgggtgagagaccgagaggggcatatccgttcacgccgatccatgaaaatgctttggaaattgacggataatatcaagtacgaggactgcgaggaccgtcacgacggcaccagcaacgggacggcacggttgccccagctgggcactgtaggtcaatctccctacacgagcgccccgccgctgtcccacacccccaatgccgacttccagcccccatacttccccccaccctaccagcctatctacccccagtcgcaagatccttactcccacgtcaacgacccctacagcctgaaccccctgcacgcccagccgcagccgcagcacccaggctggcccggccagaggcagagccaggagtctgggctcctgcacacgcaccgggggctgcctcaccagctgtcgggcctggatcctcgcagggactacaggcggcacgaggacctcctgcacggcccacacgcgctcagctcaggactcggagacctctcgatccactccttacctcacgccatcgaggaggtcccgcatgtagaagacccgggtattaacatcccagatcaaactgtaattaagaaaggccccgtgtccctgtccaagtccaacagcaatgccgtctccgccatccctattaacaaggacaacctcttcggcggcgtggtgaaccccaacgaagtcttctgttcagttccgggtcgcctctcgctcctcagctccacctcgaagtacaaggtcacggtggcggaagtgcagcggcggctctcaccacccgagtgtctcaacgcgtcgctgctgggcggagtgctccggagggcgaagtctaaaaatggaggaagatctttaagagaaaaactggacaaaataggattaaatctgcctgcagggagacgtaaagctgccaacgttaccctgctcacatcactagtagagggagaagctgtccacctagccagggactttgggtacgtgtgcgaaaccgaatttcctgccaaagcagtagctgaatttctcaaccgacaacattccgatcccaatgagcaagtgacaagaaaaaacatgctcctggctacaaaacagatatgcaaagagttcaccgacctgctggctcaggaccgatctcccctggggaactcacggcccaaccccatcctggagcccggcatccagagctgcttgacccacttcaacctcatctcccacggcttcggcagccccgcggtgtgtgccgcggtcacggccctgcagaactatctcaccgaggccctcaaggccatggacaaaatgtacctcagcaacaaccccaacagccacacggacaacaacgccaaaagcagtgacaaagaggagaagcacagaaagtgaggctctcctcccgccccgcccctcccacgcctcaccagccccccgcgcgcccaccctccggcgggtgacagctccgggatcagcaacccttcctgctgctgctactgctgctgctgctgccgccgccgccgccgccgctgcccttgggtccccccgagtctccgggactgccctctcgactgtcagtggggcagcctctccgactctgcacccgcctcgacctccccacccgctcccacacccctgtgcccccggaattc

SEQ ID NO: 4213 - DNA, 2262 bp, Homo sapiens
gaattccggcgcgctgcgaccgttggggctttgttcgcgggggtcacagctctcatggctgcagctagcgtgaccccccctggctccctggagttgctacagcccggcttctccaagaccctcctggggaccaagctggaagccaagtacctgtgctccgcctgcagaaacgtcctccgcaggcccttccaggcgcagtgtggccaccggtactgctccttctgcctggccagcatcctcagctctgggcctcagaactgtgctgcctgtgttcacgagggcatatatgaagaaggcatttctattttagaaagcagttcggccttcccagataatgctgcccgcagggaggtggagagcctgccggccgtctgtcccagtgatggatgcacctggaaggggaccctgaaagaatacgagagctgccacgaaggccgctgcccgctcatgctgaccgaatgtcccgcgtgtaaaggcctggtccgccttggtgaaaaggagcgccacctggagcacgagtgcccggagagaagcctgagctgccggcattgccgggcaccctgctgcggagcagacgtgaaggcgcaccacgaggtctgccccaagttccccttaacttgtgacggctgcggcaagaagaagatcccccgggagaagtttcaggaccacgtcaagacttgtggcaagtgtcgagtcccttgcagattccacgccatcggctgcctcgagacggtagagggtgagaaacagcaggagcacgaggtgcagtggctgcgggagcacctggccatgctactgagctcggtgctggaggcaaagcccctcttgggagaccagagccacgcggggtcagagctcctgcagaggtgcgagagcctggagaagaagacggccacttttgagaacattgtctgcgtcctgaaccgggaggtggagagggtggccatgactgccgaggcctgcagccggcagcaccggctggaccaagacaagattgaagccctgagtagcaaggtgcagcagctggagaggagcattggcctcaaggacctggcgatggctgacttggagcagaaggtcaggcccttccaggcgcagtgtggccaccggtactgctccttctgcctggccagcatcctcaggaagctccaggaagctgtggctggccgcatacccgccatcttctccccagccttctacaccagcaggtacggctacaagatgtgtctgcgtatctacctgaacggcgacggcaccgggcgaggaacacacctgtccctcttctttgtggtgatgaagggcccgaatgacgccctgctgcggtggcccttcaaccagaaggtgaccttaatgctgctcgaccagaataaccgggagcacgtgattgacgccttcaggcccgacgtgacttcatcctcttttcagaggccagtcaacgacatgaacatcgcaagcggctgccccctcttctgccccgtctccaagatggaggcaaagaattcctacgtgcgggacgatgccatcttcatcaaggccattgtggacctgacagggctctaactgccccctactggtgtctgggggttgggggcagccaggcacagccggctcacggaggggccaccacgctgggccagggtctcactgtacaagtgggcaggggccccgcttgggcgcttgggagggtgtcggcctgcagccaagttcactgtcacgggggaaggagccaccagccagtcctcagatttcagagactgcggaggggcttggcagacggtcttagccaagggctgtggtggcattggccgagggtcttcgggtgcttcccagcacaagctgcccttgctgtcctgtgcagtgaagggagaggccctgggtgggggacactcagagtgggagcacatcccagcagtgcccatgtagcaggagcacagtggatggccttgtgtccctcgggcatgacaggcagaaacgagggctgctccaggagaagggcctcctgctggccagagcaaggaaggctgagcagcttggttctcccctctggcccctggagagaagggagcattcctagacccctgggtgcttgtctgcacagagctctggtctgtgccaccttggccaggctggctgtgggagggtctggtcccacgccgcctctgctcagacactgtgtgggagggcacagcacagctgcgggtaaagtgtgagagcttgccatccagctcacgaagacagagttattaaaccattacaaatctc

SEQ ID NO: 4214 - DNA, 3683 bp, Homo sapiens
gcgagcgcagcggagcctggagagaaggcgctgggctgcgagggcgcgagggcgcgagggcagggggcaaccggaccccgcccgcacccatggcgcccgtcgccgtctgggccgcgctggccgtcggactggagctctgggctgcggcgcacgccttgcccgcccaggtggcatttacaccctacgccccggagcccgggagcacatgccggctcagagaatactatgaccagacagctcagatgtgctgcagcaaatgctcgccgggccaacatgcaaaagtcttctgtaccaagacctcggacaccgtgtgtgactcctgtgaggacagcacatacacccagctctggaactgggttcccgagtgcttgagctgtggctcccgctgtagctctgaccaggtggaaactcaagcctgcactcgggaacagaaccgcatctgcacctgcaggcccggctggtactgcgcgctgagcaagcaggaggggtgccggctgtgcgcgccgctgcgcaagtgccgcccgggcttcggcgtggccagaccaggaactgaaacatcagacgtggtgtgcaagccctgtgccccggggacgttctccaacacgacttcatccacggatatttgcaggccccaccagatctgtaacgtggtggccatccctgggaatgcaagcatggatgcagtctgcacgtccacgtcccccacccggagtatggccccaggggcagtacacttaccccagccagtgtccacacgatcccaacacacgcagccaactccagaacccagcactgctccaagcacctccttcctgctcccaatgggccccagccccccagctgaagggagcactggcgacttcgctcttccagttggactgattgtgggtgtgacagccttgggtctactaataataggagtggtgaactgtgtcatcatgacccaggtgaaaaagaagcccttgtgcctgcagagagaagccaaggtgcctcacttgcctgccgataaggcccggggtacacagggccccgagcagcagcacctgctgatcacagcgccgagctccagcagcagctccctggagagctcggccagtgcgttggacagaagggcgcccactcggaaccagccacaggcaccaggcgtggaggccagtggggccggggaggcccgggccagcaccgggagctcagattcttcccctggtggccatgggacccaggtcaatgtcacctgcatcgtgaacgtctgtagcagctctgaccacagctcacagtgctcctcccaagccagctccacaatgggagacacagattccagcccctcggagtccccgaaggacgagcaggtccccttctccaaggaggaatgtgcctttcggtcacagctggagacgccagagaccctgctggggagcaccgaagagaagcccctgccccttggagtgcctgatgctgggatgaagcccagttaaccaggccggtgtgggctgtgtcgtagccaaggtgggctgagccctggcaggatgaccctgcgaaggggccctggtccttccaggcccccaccactaggactctgaggctctttctgggccaagttcctctagtgccctccacagccgcagcctccctctgacctgcaggccaagagcagaggcagcgagttggggaaagcctctgctgccatggtgtgtccctctcggaaggctggctgggcatggacgttcggggcatgctggggcaagtccctgactctctgtgacctgccccgcccagctgcacctgccagcctggcttctggagcccttgggttttttgtttgtttgtttgtttgtttgtttgtttctccccctgggctctgcccagctctggcttccagaaaaccccagcatccttttctgcagaggggctttctggagaggagggatgctgcctgagtcacccatgaagacaggacagtgcttcagcctgaggctgagactgcgggatggtcctggggctctgtgtagggaggaggtggcagccctgtagggaacggggtccttcaagttagctcaggaggcttggaaagcatcacctcaggccaggtgcagtggctcacgcctatgatcccagcactttgggaggctgaggcgggtggatcacctgaggttaggagttcgagaccagcctggccaacatggtaaaaccccatctctactaaaaatacagaaattagccgggcgtggtggcgggcacctatagtcccagctactcagaagcctgaggctgggaaatcgtttgaacccgggaagcggaggttgcagggagccgagatcacgccactgcactccagcctgggcgacagagcgagagtctgtctcaaaagaaaaaaaaaaaagcaccgcctccaaatgctaacttgtccttttgtaccatggtgtgaaagtcagatgcccagagggcccaggcaggccaccatattcagtgctgtggcctgggcaagataacgcacttctaactagaaatctgccaattttttaaaaaagtaagtaccactcaggccaacaagccaacgacaaagccaaactctgccagccacatccaaccccccacctgccatttgcaccctccgccttcactccggtgtgcctgcagccccgcgcctccttccttgctgtcctaggccacaccatctcctttcagggaatttcaggaactagagatgactgagtcctcgtagccatctctctactcctacctcagcctagaccctcctcctcccccagaggggtgggttcctcttccccactccccaccttcaattcctgggccccaaacgggctgccctgccactttggtacatggccagtgtgatcccaagtgccagtcttgtgtctgcgtctgtgttgcgtgtcgtgggtgtgtgtagccaaggtcggtaagttgaatggcctgccttgaagccactgaagctgggattcctccccattagagtcagccttccccctcccagggccagggccctgcagaggggaaaccagtgtagccttgcccggattctgggaggaagcaggttgaggggctcctggaaaggctcagtctcaggagcatggggataaaggagaaggcatgaaattgtctagcagagcaggggcagggtgataaattgttgataaattccactggacttgagcttggcagctgaactattggagggtgggagagcccagccattaccatggagacaagaagggttttccaccctggaatcaagatgtcagactggctggctgcagtgacgtgcacctgtactcaggaggctgaggggaggatcactggagcccaggagtttgaggctgcagcgagctatgatcgcgccactacactccagcctgagcaacagagtgagaccctgtctcttaaagaaaaaaaaagtcagactgctgggactggccaggtttctgcccacattggacccacatgaggacatgatggagcgcacctgccccctggtggacagtcctgggagaacctcaggcttccttggcatcacagggcagagccgggaagcgatgaatttggagactctgtggggccttggttcccttgtgtgtgtgtgttgatcccaagacaatgaaagtttgcactgtatgctggacggcattcctgcttatcaataaacctgtttgttttaaaaaaaa

SEQ ID NO: 4215 - DNA, 527 bp, Homo sapiens
ttggggctgtgctgggttttcctcgttgctcttttaagaggtgtccagtgtcaggtgcagctggtggagtctgggggaggcgtggtccagcctgggaggtccctgagactctcctgtgcagtctctggactcacctttagtagctatggtatgcactgggtccgccaggctccaggcaaggggctgcagtgggtggcagctatatcatatgatggaagtaataaatactacgcagactccttgaagggccgattcaccatctccagagacaattccaagaacacgctgtatctgcaaatgaacagcctgagatctgaggacacggctgtgtattactgtgcgagaggggcggggattactgatttttggagtggttattacgtcaactggttcgacccctggggccagggaaccctggtcaccgtctcctcagcttccaccaagggcccatcggtcttccccctggcgccctgctccaggagcacctctgggggcacagcggccctgggctgcctggtcaaggacta

SEQ ID NO: 4216 - DNA, 531 bp, Homo sapiens; identical to SEQ ID NO: 3127
  misc_feature (1)..(531): n=a,t,g or c

SEQ ID NO: 4217 - DNA, 448 bp, Homo sapiens; identical to SEQ ID NO: 1666
  misc_feature (1)..(448): n=a,t,g or c

SEQ ID NO: 4218 - DNA, 333 bp, Homo sapiens
caactgctaacccccatcctcatatttctgtctgtcccagcacctcaggagcattctcattgtggccggctaactccgcctggatgtgaacaggcaagcacagtgggaaatgagtcacgtacttgtattgcacagtggacacctctagaggtccattggtttaaagggatagggaaggaggagggatgagaccatcaccccctcccagaagtaaatctagtatctgagttttctttatgcccttgagtcaaactaataactgtctagtacggaggtgtttgctggttttcttcggtgttttttctaatgcaataaactcatttctgcctgctg

SEQ ID NO: 4219 - DNA, 567 bp, Homo sapiens; identical to SEQ ID NO: 1667
  misc_feature (1)..(567): n=a,t,g or c

SEQ ID NO: 4220 - DNA, 521 bp, Homo sapiens
  misc_feature (1)..(521): n=a,t,g or c
gtaatatggaattagaaacaatttggctttttagagctgaaactagaaacaacacatccaggaacagtagacttctattgtcttcaatccctaatgtcctagtgagtatgtaccctatggagaaggcagaaatgacgtggaccaggactccttacatggagagtgttttaaaggcagtttttaaaaagcccattttgtgaaagaaaccagaaggctcgtaattgctgtctgcactgtggtttctcctgggggttggggaggggagtggattaaataaaaagtttagaaggccatagnataaatatcgaaatagtatgaattttaatatatacttttaaaggggttaggcaatgatgaaaagatatgactgctttcctttcatttctcattaaattaaaattcccacaaaagtgcatggcatctttttgaaacactgctaattttaaagtttgggaaggtttatcttcatagccacaatctttgcnaaagccttggtaccggnaacaaggctccagtctgcc

SEQ ID NO: 4221 - DNA, 265 bp, Homo sapiens
gtggaaatgtaagtcgcttactctacaaattttggtgctggcaaatacataggcaaactgttgggagctgctctagttacattcctcccttcttattccctctttctcttcctcactctattgcataacatattcctgtacccaaagcattctaccacagttctatttgactcccacttgtaataactcctttaaaaattcatgtttaaccatatgaccctgcttgcttactcatattctccctcctctcccttcttctctctct

SEQ ID NO: 4222 - DNA, 269 bp, Homo sapiens; identical to SEQ ID NO: 2070

SEQ ID NO: 4223 - DNA, 518 bp, Homo sapiens
  misc_feature (1)..(518): n=a,t,g or c
actcaatagttgagtttggctgttgttgcaggaaaatgattataactaaaagctctctgatagtgcagagacttaccagaagacacaaggaattgtactgaagagctattacaatccaaatattgccgtttcataaatgtaataagtaatactaattcacagagtattgtaaatggtggatgacaaaagaaaatctgctctgtggaaagaaagaactgtctctaccagggtcaagagcatgaacgcatcaatagaaagaactcggggaaacatcccatcaacaggactacacacttgtatatacattcttggagaacactgcaatgttgaaaatccacgtttgctatttataaacttgtccttagattaatgtgtctggacagattgtgggagtaagtgattcttctaagaattagatacttgtcactgcctatacctgcagctggactgaatgggacttcgtatggttaatagttggttcnggataaatccatgccaattaaaggtaaagtgatgcc

SEQ ID NO: 4224 - DNA, 466 bp, Homo sapiens; identical to SEQ ID NO: 3325

SEQ ID NO: 4225 - DNA, 905 bp, Homo sapiens
  misc_feature (1)..(905): n=a,t,g or c
atacactcagtgcagccttaagcaaatgagatcattttcagatttcattttttttttcagtctttctacttttgtaataataggaagttagtaggactcacttctctgattaataagcaatttgcagcacacagcgttccactgcggggtttcacgctcacctgaaaacacctgttcccaacctacttcttggtgcaagttgaccaaatcgttttaagtggtaactttttccaaccgtagcagggttgttttctgttaagcaaagccgagatccagtgcaatacctggactgtcaccgtcctgtgagtggtgtacacaatgggaagataataagccgtggtgttttgctgtctgtctgtgtcacaagcatgaaaacccgtgtgtcattgatcagcaccatttgtggtatgttccgtgatgagcgtttagtgagcctgctggctgcagagcactatgaaatcatggtacgtagtccccggcacctgtcgttattcctatatcctcctgcaactgtggtttgaaactgcgcattctctagtagtatatatcgtgcctgtcttcaaaacatgtccctttttatactcattcccccaggcatggggtagtgctagtcgactgacagggacacgggttcagtggcttggccctatctggaacgctgcctgtacgatngtatgggtgctcaatccgtgttcctagcgtctacgaggctaaacggggatggagttaccacntctagcgcggatgcatcncatgaaaggaagcaccttgtggaccggcacggtactggatcacaagaggtgttattgtaatagagcttatgaaacgccccttgtataaaagattgcggccttgtttgcggtggtggaggattcactgtggcccttgcgaggcgtcccttttta

SEQ ID NO: 4226 - DNA, 468 bp, Homo sapiens
gcgaatactttattatcgagtgactggtattagctttttgtctgggcattaatatctcaaaaaccatacaccaaacccaggcttttccacctagctctgctgtatcattttctttatatatatatataaaaagtaaggaagaggaaggaggaagagaaagaaaatatatctgtattgaaagaattataagccaaagtgcgtctttcttgttttgtccatatacacacattgcaccatacataaatagatacattgtaaaaatgactccataattacaagtataatatatatttccatataatatataaaactttatattaaatctaggtagatgatatctgggggggttttgtccgtgggggctgtgtctctgggcatcggcactctcgaggccggcagtaggcggtggcgcggcctcccacccgctcctcccgccggggcgccactatctggggttgttgaggagat

SEQ ID NO: 4227 - DNA, 423 bp, Homo sapiens; identical to SEQ ID NO: 2073

SEQ ID NO: 4228 - DNA, 103 bp, Homo sapiens; identical to SEQ ID NO: 2074

SEQ ID NO: 4229 - DNA, 431 bp, Homo sapiens
cagaggctttagaaatttattacaaggccctcatagtagaaataaaaatatagatatctatgcttcccatctcgctctcagtggttcgaataacaagtgcaagtaacaaaatagattgtctctataattcgcaaactgggagttcatgggtacagagcaacttcagccccagctcccaagtcccaaagtgtggtcttgtcgagggtgcagacaaggaccaaccaagttcaaccaagtctctcgtatgcagacgccagctccagtctcaaggagggtggggcttgcagtcagtctcactccacccccgagtggacagtctggaccctccgtgatggggaaggcggcacgtgccccgccactccggcttctgctccatcccaaggcctcagcttcgggggtcctgtctcctgctggcctgggtcccccttctc

SEQ ID NO: 4230 - DNA, 190 bp, Homo sapiens
tttcagactttttggtgctagtatatagaaataccattgatttttgtttattgatcttatatcctgtgacctgtctaaattcaatctgttagttttatcattttttaaaaaaatgtccgtgtgtgtcttccttgagattttctacattatcatgtcatctgcaaataaagacatttacttctttctttcc

SEQ ID NO: 4231 - DNA, 306 bp, Homo sapiens
  misc_feature (1)..(306): n=a,t,g or c
ggcccacaagggtgcccacctcttgttttccccttttaaaaactcagatttttaaaagccctttccaaaggtttcaactgtaaaatacttctttttacaatgtatcaacatatttttatttaaggggaattaacaattgccagggaaaccagccaacccaagtttattatatcattaaccttatcataaattcaaacctaagttgctggaccctggtgtgaggncataaatcttccaaagttttgcctatcctaagagctgcatttttctactgctctttaccttgcattttagctaatttaggag

SEQ ID NO: 4232 - DNA, 490 bp, Homo sapiens; identical to SEQ ID NO: 2468

SEQ ID NO: 4233 - DNA, 319 bp, Homo sapiens
aagcattacagacagatggagccatctatccaagaagccttcactcaccttcactgctgctgttgcaactcggctgttctggactctgatgtgtgtggagggatggggaatagaacattgactgtgttgattaccttcactattcggccagcctgaccttttaataactttgtaaaaagcatgtatgtatttatagtgttttagatttttctaacttttatatcttaaaagcagacacctgtttaagcattgtacccctattgttaaagatttgtgtcctctcattccctctcttcctcttgtaagtgcccttctaata

SEQ ID NO: 4234 - DNA, 487 bp, Homo sapiens
cggaagggacagtatcgtttgtttatgaaatgccactgggacagctggctgggccttcaccaagcaagtcccttcagactggcccttaagccaaactcaggcccagaattgcagttcagaatggcagtcctggaggcagggggtgaggggcaggtctagtgttcctgcaccaaacctaagtccttccacctgccacccccttccctgggagggaggtggtcctcctatctccctggctcactggcaggtgtgggatctggggagagcggctggagaaagatgcagtcctcaggaagggggccgccaccctcccctatgctggtagatgctgaggcccctaggtgcccagggccagtgggaccctctcagaaccaaatctttcccctttctcggggcttggggctcgggccgtaggggctcctgagtgtcatgaagtgcacaggagccaaatgaccgagccctggagagccccatggtgggtaggtgg

SEQ ID NO: 4235 - DNA, 342 bp, Homo sapiens; identical to SEQ ID NO: 3186

SEQ ID NO: 4236 - DNA, 232 bp, Homo sapiens
ttaattcaaaacatgttaaacgttactttcatgtactatggaaaagtacaagtaggtttacattactgatttccagaagtaagtagtttcccctttcctagtcttctgtgtatgtgatgttgttaatttcttttattgcattataaaataaaaggattatgtatttttaactaaggtgagacattgatatatccttttgctacaagctatagctaatgtgctgagcttgtgc

SEQ ID NO: 4237 - DNA, 409 bp, Homo sapiens
gggtttctttgtacttgttaaaccacatttgaggtttatggtaaaaatcatcttttgagtttgctctttggtttttcttcattccttttgaggattgggaaaacagaaagattctttgatttgggtaatgaagaggtaatttgggacagtgtggtggtacaggaagaaagaggattggaaaggccagtactgttttagttgctcggcactgttggttttgttttaatgtggttgccctgtccactacatggttctatcagtagtgtaatccattttcaatgtaaagctcttttagtttttgtcatagacataaattaatattttgagaggcatccctcacctgttcatttcttctgtgttgaaatgaagtacttaaaattaccgttatacatgaactttgtggactgta

SEQ ID NO: 4238 - DNA, 586 bp, Homo sapiens; identical to SEQ ID NO: 3191

SEQ ID NO: 4239 - DNA, 335 bp, Homo sapiens; identical to SEQ ID NO: 3333

SEQ ID NO: 4240 - DNA, 190 bp, Homo sapiens; identical to SEQ ID NO: 3197

SEQ ID NO: 4241 - DNA, 369 bp, Homo sapiens; identical to SEQ ID NO: 2478

SEQ ID NO: 4242 - DNA, 6823 bp, Homo sapiens
ggcggacaaaacgccaggcggatctcagaaggccagttcaaagacgagatcatcagatgttcattcatctggatcttcagatgcacatatggatgcatctggaccctcagatagtgatatgccaagtcggacacgacctaagagcccaagaaaacataattataggaatgaaagtgcccgtgaaagcctttgtgattctcctcatcagaatctctcaagacctcttctggaaaacaaacttaaagcattcagtattggaaaaatgagtacagctaagcgaactttaagtaaaaaggaacaggaagaattaaagaaaaaggaggatgaaaaggcagctgctgagatttatgaggagtttcttgctgcttttgaaggaagtgatggtaataaagtgaaaacatttgtgcgagggggtgttgttaatgcagctaaagaagaacatgaaacagatgaaaaaagaggtaaaatctataagccatcttcaagatttgcagatcaaaaaaatcctccaaatcagtcttccaatgaaagaccaccatctcttcttgtgatagaaaccaaaaaacctccacttaaaaaaggagagaaagaaaagaaaaaaagcaatttggaactcttcaaagaagaattaaagcaaattcaagaggaacgtgatgagagacataaaacaaaaggcagattaagtcgatttgaacctcctcagtcagattctgatggtcagcgtcgttctatggacgcgccttcaagaagaaatagatcatctggtgttcttgatgattacgcacctggctcacatgatgtaggagatccaagcactactaatttataccttggaaacattaatccacagatgaatgaagaaatgctgtgccaagaatttggaagatttggaccgttagccagtgtgaaaatcatgtggcctagaactgatgaagaaagagccagagagagaaattgcggctttgtggcctttatgaatagaagagatgctgaaagagctttaaaaaatttgaatggaaaaatgattatgtcttttgaaatgaagttaggttggggtaaagctgtacctattcctccacatccaatatacattccgccttctatgatggaacatacgcttcccccacctccatccggactgccttttaatgcgcagcctagagagcggttaaaaaaccctaatgctcctatgttaccgccacctaaaaacaaagaggattttgagaagactctgtcgcaagccatagtcaaagtggttatcccaacagaaaggaatttgctcgccctgatacatcgaatgatagagtttgttgtacgtgaagggccaatgtttgaagctatgattatgaacagagaaatcaacaatcctatgttcaggttcttatttgaaaaccagacaccagcccatgtttactataggtggaagctttattctattctgcagggagattctccaactaaatggcggacggaagattttcgtatgttcaaaaatggatctttttggaggccaccaccattaaatccgtacttgcatggaatgtcagaagagcaagaaacagaagcttttgtagaggaacctagtaaaaagggagcacttaaggaagaacagagggataaattggaagaaatcttgcggggattaactccaaggaaaaatgatattggagatgcaatggttttctgtcttaataatgctgaagctgctgaagaaatagtggattgcattactgagtcgttgtccatcttaaagacaccccttcctaaaaagattgccagattatatttggtttctgatgttttgtacaactcttcagccaaagttgctaatgcttcatattatagaaaattttttgaaacaaagttatgtcagatattttcagacctcaatgccacctatcgtacaattcaaggccatttacaatctgaaaactttaagcaacgggtaatgacttgcttcagagcatgggaagattgggcaatttatccagaaccatttttgatcaaactacaaaatattttcttaggacttgtaaatattattgaagaaaaggaaacagaggatgttccagatgaccttgatggtgcccccatcgaggaagagcttgatggtgcacctctggaagatgtagatggaattcctattgatgctactcccatcgatgatcttgatggagtccctataaaaagtcttgatgatgatcttgatggagtgcctttggatgcaactgaagactcaaaaaagaatgagcctatatttaaagttgccccatcaaaatgggaagctgtggatgaatctgaattggaagcacaggctgttacaacttctaaatgggaattatttgaccagcatgaagaatcagaagaagaagaaaatcaaaatcaagaagaagaaagtgaagatgaagaagatactcaaagttccaaatctgaagaacatcatttgtactctaatccaatcaaagaagaaatgactgagtctaagttctctaagtactctgaaatgagtgaggaaaaacgagccaaacttcgtgaaattgagctcaaagttatgaagtttcaggatgaattggaatctgggaaaagacctaaaaaaccaggccagagttttcaggagcaagtagaacactacagagataaacttcttcaacgagagaaagagaaagagttagaaagagaacgagaaagagacaagaaagataaagaaaaattggaatctcgctccaaagacaagaaggaaaaagatgagtgtactccgacaaggaaggaaaggaagaggcgacacagtacatcccccagcccatctcgcagtagcagtggtagacgagtgaaatccccatcaccaaaatcggagcgatcagagcgttcagaaagatctcataaagagagctcacggtccaggtcatctcacaaagattctcctagagatgttagcaaaaaagccaaaagatcaccatctggttcaaggacacctaaaaggtctaggcgatcacggtctagatctcctaaaaaatcaggaaagaagtccagatcccagtccagatctccacacaggtctcataaaaagtcaaagaaaaacaaacactgacgtaaatttttaagatgctgtcacttattggaaatgcgatttgttttgtgcctgaacggtctgttttttaaaaaaacaaaaaatcaaatgaaagagcattcctggggttttttgtttgtttgtgtatgcatgtgtaaactcatgagcaactgcatctgtagatctgtcattgttttatattgtgtaaattactttcattgtggctatttctcaagatgaaatttttattgttctaatggatttcatcagaaatgtgtataatggatctgctgacagtagtagtattttgttttaggatgttgtgacttagcaaaaataatacagatgtcttccccccttttgtagctttgacaatttgaattagatttcaaataaaatctgaacagaaaactataatgttgtttttttgccccaccggtgatattaagtcccttaaagtcctactgagtttcacactactgttgtgcttcttatacctgatgcactttataagccccagtgttcaagtagcttaagttttatatttactaagatgactatccaaattaagggacctgagactcctatttggtggtttgctaaccatttgcttttgataagtttctcttgggtaatactaatacccagatatcaaagactaggtagatatggcatggcgttttgttagtggaatgcctggctaaaacatttttttcacagaagcaatatgatttccatacatccaacccatgttctgagcaactacttacttttagggggaaattaaatatcttttcatttcctcttctattatgaaagaagtttatttgtaaaacaaattttctaacaaggtttggccatagaattctcttgtatgattgttgaccttttataatcttctgtaggctatctttcaaacactggcatcagaatattttttataagtttgtgtttaaacagcttagttggtccccccccccactcccaagagacttgggtttagttatagctttaagtaaaatttaaaaataaaatgtttttcaggaaacttcgtatctaatggtttgtaaattcaaggtgcaaaaagttgatttaaaccatttgcagagttgaactctattatgaaaataaatttgctacggtatgaggaagaaataaaacttgtgtaatgttggtcataatactgctataaatataataaagggttatgtagaattgaactgacactattatttgtgaatcttgatttcagttttttatgtaggcacttcatacactggtttgatgggttttttttttcctccctaaaagagaaagtagaaaactattctaacaatggattattttgatttagcttgctttttaaaaaaatcttttcaacttgttttacttaatcttgcctagtcacaaaataagatgtgcacccatggtttggagagttcctatattagctgagcagtgagatacactatttccaaacggtgcacacctacagtagctttggaaatgagccaatcactgttttacttaatggttcttatcagcatgcaaatattgcttgaaagttatttccttattcactgttttgttagtccattttgttaggaaacattaattcctaaaaatttgttcagaataattaaaagtgaacatttggtgctgatactcaaaaacctacaaatgtagccatttaaaaagtaacatgtttttctcccctgctcattgcctgggagaatggaattttatataactacctttctttgcaaaaataacggtcgtgtcgagttggtggtgattttggcattccatcttgcactggtttctagtataggcttagaaataattggtcaggtaataatctttccagtcaagttgcaagggatgcttatttctcttcaaaaaaagacatcctgcgggattgagtagaaaattttaggtcagttttgggtgcttatttgtaatatttttcctactacattggagtttagcagttctttttttctggatccagatacaagtgtcatggtttatcttacagtgggtgaaactgactttcttttggttgggtgggtgaggatttcttaggcctgatagaatatatattctgtgaagtttgttaatgtacatattagattgtattggatttttttttcttgaattgcaaatggtattattagataggttatttccagttttacttcatgacaaattacctagagtaaacctacttaatactccaatggattctatgaaagtttaatgggatcagaaattggtgacttataagggggaagatattctaccatatttttataatagcttattattcatgtttcttgtctgaaggacactcaagttacagagcaaaatttctataggttgactagaatgttcataagcatggtcttccagttgcaggaaagatcatgttctatctgtggacacttactgtcctctaccacagctacgtgccagagttgttttccacagttcttataaagggcatgacttaggctctttaccctccaacttaatgtttatacacagggattgtttactaggttaatgacatttaactcccctctcttctgtaggtgagagaaaataagtaagtcttgatctgtttcttaccaaagagagacagacctatgatggaaaatgatcacgtctctgaattttttctttaacgttatagttccttattacagatagtaagcatatgggaatttctgagctataacatgttgagaagttagaaattaaaactaacacaacaaaaggcgctgaatcaaaagatctttgcttttatttggctcagaatgtttttggcttttctgctaaagatggcagaaattactctacacagacctgatttttctttattgcagaccattcttgtgggcttaccctgagacttttatcccaattagtgaatcttggagggaatacttgcttatttatgacttaggtatttccccccaaactttaatattcttgagcacttgaaaatacttttgagaaattttaactgtgattaaatttaggtttattagaaatattctgtacacatttgcctccatggtggtgtaagttctgaaaaattatatgaccgtgacaatagtttatcatcatcattattgttattcaaaataagggtaaataaatctctgtattgccaaagtgacttaaactgttctgatgaccacacagtgtgatttctttagcagagaaagttggttttaaaaataaatagtaccacttttctaagactgtacagtttacaaataaggtttttttctttgttgttttcctcttctattaagttttagtgaaaagcctaattacagaaaattgtgcagatactagtgaagatactagtataagtttaaaggaacatgtgactgtaaaatctcacatttacaaagtgcttgatctcttcatatttcacacgcatgttttagaatagattttagggagtgtttaattcattatccttttgacttaaaatttttgttaccaacttcctaggacttagataatatataaataagtacaaatcccaggggaagtgttgtgatgctagactaaaaggtgggaatgtgctgctgttccgtgagccttgttccattgttgaaaatttgatgcctcagtgtttattcagtaccacctcatggagcttcaatgtaaatggattatatgtataattggtaatttgtatagttttgtagattgtagattaaatgcactcatcatgtc

SEQ ID NO: 4243 - DNA, 6289 bp, Homo sapiens; identical to SEQ ID NO: 3846

SEQ ID NO: 4244 - DNA, 6651 bp, Homo sapiens; identical to SEQ ID NO: 79

SEQ ID NO: 4245 - DNA, 393 bp, Homo sapiens; identical to SEQ ID NO: 3207
  misc_feature (1)..(393): n=a,t,g or c

SEQ ID NO: 4246 - DNA, 456 bp, Homo sapiens
aagaaaaagaagaaagacacaaagaaaataatctaaacaccaaaaactaaacacaattccaatcctttttctgtacctcacgcgcataaatttgctgctcctatttttttttctgtttatgtgtttttatggatctaagttaaatcttttggcaatatataaaaatgtaaatagtaaactttatttattaagaatgtcatcttttttaatttatatttacacaattgttcatctaatttattttttctatacagttttaaatactcagacatattttgctgttcatgatatttttatcctgttctcatggatttgttttcccatactgttttctctgatctcaattacaggttggatctcacaaataataatgtcagagacagaaatattttgccactgttgattactatactttaaagttctatattatgaaaatatataatagcttgtacgctt

SEQ ID NO: 4247 - DNA, 400 bp, Homo sapiens
attcttcaggccaatactatccagactatataaatttataavataaattgaaaaattcattcccctgtattcaagaccaaagcacataaatgctaatgtagggctcagaggggaaatacagttctcctgcatatttgagaaaatgtgaagtcctttcaagaaaatctaataaacataataatcatagcctgctgacactaaggaaaaaggacctcattcactctttcttttatgcagtgatttactggtccctactgatttccaaattggvtcacgrtagtaaattatccatgctggtacctgtgaaagtaagccctgggmtccatatttgtbttgtgttctgcttaaatcagcaagaatgataaatttgatggtgtgaaattggaagtatcaagggctt

SEQ ID NO: 4248 - DNA, 460 bp, Homo sapiens; identical to SEQ ID NO: 1681

SEQ ID NO: 4249 - DNA, 433 bp, Homo sapiens
  misc_feature (1)..(433): n=a,t,g or c
tgaatattattcaattgaaaccaaagaaatntcatgtagtttacatctcaagactcaattctctaaactaaatatcttgaatttaaaatttacttcacaaatgaaaggggcttagcttttccagcacagtgtttggcaaagtcaggcttttcatggagttctggttgaggagtccaaatttggctctgtggctgactgcagaatgacttgtcatcccaggtccttaaacatgccattttgcctctaggtcattgattttccaatcataaaataaggagactaacatttccttgtgtgtgtgtgagatcgtaggcacctgtaatgacgtctatgccttccataaccgacacaccatccaccccaaacattaggaaaatggcatgcggttggggaaaaaattgtgagctttacatcaactaaanttggaggnggg

SEQ ID NO: 4250 - DNA, 2620 bp, Homo sapiens
ggggccagctgcagcctcagccccacaagtcttgcagaaacagtccattgtgaccttcagcctgtgggccccgagaggggcgaggtgacatataccactagccaggtctcgaagggctgcgtggctcaggcccccaatgccatccttgaagtccatgtcctcttcctggagttcccaacgggcccgtcacagctggagctgactctccaggcatccaagcaaaatggcacctggccccgagaggtgcttctggtcctcagtgtaaacagcagtgtcttcctgcatctccaggccctgggaatcccactgcacttggcctacaattccagcctggtcaccttccaagagcccccgggggtcaacaccacagagctgccatccttccccaagacccagatccttgagtgggcagctgagaggggccccatcacctctgctgctgagctgaatgacccccagagcatcctcctccgactgggccaagcccaggggtcactgtccttctgcatgctggaagccagccaggacatgggccgcacgctcgagtggcggccgcgtactccagccttggtccggggctgccacttggaaggcgtggccggccacaaggaggcgcacatcctgagggtcctgccgggccactcggccgggccccggacggtgacggtgaaggtggaactgagctgcgcacccggggatctcgatgccgtcctcatcctgcagggtcccccctacgtgtcctggctcatcgacgccaaccacaacatgcagatctggaccactggagaatactccttcaagatctttccagagaaaaacattcgtggcttcaagctcccagacacacctcaaggcctcctgggggaggcccggatgctcaatgccagcattgtggcatccttcgtggagctaccgctggccagcattgtctcacttcatgcctccagctgcggtggtaggctgcagacctcacccgcaccgatccagaccactcctcccaaggacacttgtagcccggagctgctcatgtccttgatccagacaaagtgtgccgacgacgccatgaccctggtactaaagaaagagcttgttgcgcatttgaagtgcaccatcacgggcctgaccttctgggaccccagctgtgaggcagaggacaggggtgacaagtttgtcttgcgcagtgcttactccagctgtggcatgcaggtgtcagcaagtatgatcagcaatgaggcggtggtcaatatcctgtcgagctcatcaccacagcggaaaaaggtgcactgcctcaacatggacagcctctctttccagctgggcctctacctcagcccacacttcctccaggcctccaacaccatcgagccggggcagcagagctttgtgcaggtcagagtgtccccatccgtctccgagttcctgctccagttagacagctgccacctggacttggggcctgagggaggcaccgtggaactcatccagggccgggcggccaagggcaactgtgtgagcctgctgtccccaagccccgagggtgacccgcgcttcagcttcctcctccacttctacacagtacccatacccaaaaccggcaccctcagctgcacggtagccctgcgtcccaagaccgggtctcaagaccaggaagtccataggactgtcttcatgcgcttgaacatcatcagccctgacctgtctggttgcacaagcaaaggcctcgtcctgcccgccgtgctgggcatcacctttggtgccttcctcatcggggccctgctcactgctgcactctggtacatctactcgcacacgcgttcccccagcaagcgggagcccgtggtggcggtggctgccccggcctcctcggagagcagcagcaccaaccacagcatcgggagcacccagagcaccccctgctccaccagcagcatggcatagccccggccccccgcgctcgcccagcaggagagactgagcagccgccagctgggagcactggtgtgaactcaccctgggagccagtcctccactcgacccagaatggagcctgctctccgcgcctacccttcccgcctccctctcagaggcctgctgccagtgcagccactggcttggaacaccttggggtccctccaccccacagaaccttcaacccagtgggtctgggatatggctgcccaggagacagaccacttgccacgctgttgtaaaaacccaagtccctgtcatttgaacctggatccagcactggtgaactgagctgggcaggaagggagaacttgaaacagattcaggccagcccagccaggccaacagcacctccccgctgggaagagaagagggcccagcccagagccacctggatctatccctgcggcctccacacctgaacttgcctaactaactggcaggggagacaggagcctagcggagcccagcctgggagcccagagggtggcaagaacagtgggcgttgggagcctagctcctgccacatggagccccctctgccggtcgggcagccagcagagggggagtagccaagctgcttgtcctgggcctgcccctgtgtattcaccaccaataaatcagaccatgaaaccagtgaaaaaaaaaaaaa

SEQ ID NO: 4251 - DNA, 3150 bp, Homo sapiens; identical to SEQ ID NO: 2790

SEQ ID NO: 4252 - DNA, 562 bp, Homo sapiens; identical to SEQ ID NO: 3243

SEQ ID NO: 4253 - DNA, 2907 bp, Homo sapiens; identical to SEQ ID NO: 3345

SEQ ID NO: 4254 - DNA, 2867 bp, Homo sapiens
ttttcggctgcttggtaacgggctgccagaagagagaggcagagagcagggcagcggcttcttgacgtcagggccaagcgaggggatgcgcgccagcaacccccagctctccccagagaggggccggccgaggctggagcggagcctgacgccaggcgcccgcggagcgtgagtagggggcgcgggagccggtcagctggggcgcagcatgccctctgctcccgcgccatggagatcgccctggtgcccctggagaacggcggtgccatgaccgtcagaggaggcgatgaggcccgggcaggctgcggccaggccacagggggagagctccagtgtcccccgacggctgggctcagcgatgggcccaaggagccggcgccaaaggggcgcggcgcgcagagagacgcggactcgggagtgcggcccttgcctccgctgccggacccgggagtgcggcccttgcctccgctgccagaggagctgccacggcctcgacggccgcctcccgaggacgaggaggaagaaggcgatcccggcctgggcacggtggaggaccaggctctgggcacggcgtccctgcaccaccagcgcgtccacatcaacatctccggcctgcgctttgagacgcagctgggcacccaggcgcagttccccaacacactcctgggggaccccgccaagcgcctgccgtacttcgaccccctgaggaacgagtacttcttcgaccgcaaccggcccagcttcgacggtatcctctactactaccagtccgggggccgcctgcggaggccggtcaacgtctccctggacgtgttcgcggacgagatacgcttctaccagctgggggacgaggccatggagcgcttcggcgaggatgagggcttcattaaagaagaggagaagcccctcgtccgcaacgagttccagcgccaggtgtggcttatcttcgagtatccggagagctctgggtccgcgcgggccatcgccatcgtctcggtcttggttatcctcatctccatcatcaccttctgcttggagaccctgcctgagttcagggatgaacgtgagctgctccgccaccctccggcgccccaccagcctcccgcgcccgcccctggggccaacggcagcggggtcatggccccgccctctggccctacggtggcaccgctcctgcccaggaccctggccgaccccttcttcatcgtggagaccacgtgcgtcatctggttcaccttcgagctgctcgtgcgcttcttcgcctgccccagcaaggcagggttctcccggaacatcatgaacatcatcgatgtggtggccatcttcccctacttcatcaccctgggcaccgaactggcagagcagcagccagggggcggaggaggcggccagaatgggcagcaggccatgtccctggccatcctccgagtcatccgcctggtccgggtgttccgcatcttcaagctctcccgccactccaaggggctgcagatcctgggcaagaccttgcaggcctccatgagggagctggggctgctcatcttcttcctcttcatcggggtcatcctcttctccagtgccgtctacttcgcagaggctgacaaccagggaacccatttctctagcatccctgacgccttctggtgggcagtggtcaccatgaccactgtgggctacggggacatgaggcccatcactgttgggggcaagatcgtgggctcgctgtgtgccatcgccggggtcctcaccattgccctgcctgtgcccgtcatcgtctccaacttcaactacttctaccaccgggaaacggatcacgaggagccggcagtccttaaggaagagcagggcactcagagccaggggccggggctggacagaggagtccagcggaaggtcagcgggagcaggggatccttctgcaaggctggggggaccctggagaatgcagacagtgcccgaaggggcagctgccccctagagaagtgtaacgtcaaggccaagagcaacgtggacttgcggaggtccctttatgccctctgcctggacaccagccgggaaacagatttgtgaaaggagattcaggcagactggcagactggtggcagtggagtagggaatgggaggcttgctgaacatggatatctacattataccgcagagtattgagtcacactgtaacctcagtctacccctctccttcactcctttcctccctccctcggatccccccattttctctattctttccatgaacacccaagggtcgcctaatttttaaaaagtaccacattccatgacgcaggagctgtggaaatggtgagcgctgtgagatggatgtatttgtagccagtctcctatacccagcagagggataacccaaacaaaaatgactctaaatagcccagatcccaagagattatgtaactcctccatccatgtgttccaaatttgctttacatatgattgtatttgtgtataggggaaaatattatttttatgcctggtaagtggctttttgtactgtagtcagatagagatatttggtatatttcaagatacatgttgtatttatggaagaatgtgttggtcctgatggtttttctgtgttactatattagagtcagagatcttggtatgggctgttctgtttcctgtgtctccaagcctctgtcttttctgggatgtggtattggtgctttgtgtctagggcagagtatgttcttgaagaaaggcaaatctgactttttctgtgcgccttaaacaattcttgtaactttcttcaaaaagcattttaatgatattggaggaatacttctgataatttattgtctttatttttatcccaggaaataaaaggttaccttgtt

SEQ ID NO: 4255 - DNA, 950 bp, Homo sapiens
ttcaaatgaagtaaatgggaaaatggagcattgttgagtccagggagctataatttaaaccccatatatctaaaaggggtaacatttttgtgtgtgtgaaattggtgtcattcgcactgcatctacagttttctttttccttctcttccagcacccctggctacatatttgggaaacgcatcatactcttcctgttcctcatgtccgttgctggcatattcaactattacctcatcttctttttcggaagtgactttgaaaactacataaagacgatctccaccaccatctcccctctacttctcattccctaactctctgctgaatatggggttggtgttctcatctaatcaatacctacaagtcatcataattcagctcttgagagcattctgctcttctttagatggctgtaaatctattggccatctgggcttcacagcttgagttaaccttgcttttccgggaacaaaatgatgtcatgtcagctccgccccttgaacatgaccgtggccccaaatttgctattcccatgcattttgtttgtttcttcacttatcctgttctctgaagatgttttgtgaccaggtttgtgttttcttaaaataaaatgcagagacatgttttaagctgatagttgaggggttttgttaatggcttttgggggatttatctctatacccacaaacgactagtttgttttcctcaaactaaatgataatattaaaaatacacatcctggccaggtgtggtggctcatacctgtaatcccagcactttgggaggccgaggcaggtggatcacttgaggtcaggaattaagaccagcctggccaatatggtgaaagcctgtctgtactaaaaatacaaaaattagccaggtatgctggtggatgcttataatcccagctacttgggaggttgaggcaggagaattgcttgaacccggga

SEQ ID NO: 4256 - DNA, 1105 bp, Homo sapiens; identical to SEQ ID NO: 168

SEQ ID NO: 4257 - DNA, 6314 bp, Homo sapiens; identical to SEQ ID NO: 3346

SEQ ID NO: 4258 - DNA, 222 bp, Homo sapiens; identical to SEQ ID NO: 1685

SEQ ID NO: 4259 - DNA, 385 bp, Homo sapiens
  misc_feature (1)..(385): n=a,t,g or c
caagctaaagcaaaccatcttatacagagatctagaatcttatattttccataggaaggtaaagaaatcattagcaagagtaggaattgaatcataaacaaattggctaatgaagaaatcttttctttcttgttcaattcatctagattataaccttaatgtgacacctgagacctttaggacagttgaccctgaattaaatagtcacatgggtaacaattatggcactgtgtaattttaggtaatgtattaacatggcaatggatggcactttaactgaggataggggactatgttagggaaaattggaactaattttaattatttggattgttttaatccctaaaggccttaggttaggccttttcccggatccttnaagggt

SEQ ID NO: 4260 - DNA, 418 bp, Homo sapiens
  misc_feature (1)..(418): n=a,t,g or c
cgtgtggcttttccggataccaggaaaacatactgctttgatgctttccccagcattgacaagatatctaaagtcacctctcctgtgttggtcattcatggtacagaggatgaggtcatcgatttctcccatggcctagcgatgtacgagcgctgtccccgagccgtggagcccctttggtntgaaggggctgggcataatgacatagagctttatgcacaatacctagaaagactaaaacagttcatatctcacgaacttcctaattcctgaagacaacaacttgatcttacctcatttactgtgaacagaagagtcctctgttttgcacatgctttaactgggtagctgtaaaggcttgataaccatggaagaagtgcccaacctttagggtgttcntaatcaaagagctggatgg

SEQ ID NO: 4261 - DNA, 417 bp, Homo sapiens
  misc_feature (1)..(417): n=a,t,g or c
tcaatttgctcactggccagagacattgatggcagttcttatctgcatcactaatcagctcctggatttttttttttttttttttcaaacaatggtttgaaacaactactggaatattgtccacaataagctggaagtttgttgtagtatgcctcaaatataactgactgtatactatagtggtaacttttcaaacagcccttagcacttttatactaattaacccatttgtgcattgagttttcttttaaaaatgcttgttgtgaaagacacagatacccagtatgctttaacgtgaaaaggaaaatgtgttcncgtttttgtaaaggggacntttcaagggatttgttngtaaaanactttgggncagagggtttgcccgaaccttttaaaaaaaatttaattnatttattnata

SEQ ID NO: 4262 - DNA, 2657 bp, Homo sapiens
cccgggcggagggggcgggaagagcgcgtcctggccaagccgagtagtgtcttccactcggtgcgtctctctaggagccgcgcgggaaggatgctggtccgcaggggcgcgcgcgcagggcccaggatgccgcggggctggaccgcgctttgcttgctgagtttgctgccttctgggttcatgagtcttgacaacaacggtactgctaccccagagttacctacccagggaacattttcaaatgtttctacaaatgtatcctaccaagaaactacaacacctagtacccttggaagtaccagcctgcaccctgtgtctcaacatggcaatgaggccacaacaaacatcacagaaacgacagtcaaattcacatctacctctgtgataacctcagtttatggaaacacaaactcttctgtccagtcacagacctctgtaatcagcacagtgttcaccaccccagccaacgtttcaactccagagacaaccttgaagcctagcctgtcacctggaaatgtttcagacctttcaaccactagcactagccttgcaacatctcccactaaaccctatacatcatcttctcctatcctaagtgacatcaaggcagaaatcaaatgttcaggcatcagagaagtgaaattgactcagggcatctgcctggagcaaaataagacctccagctgtgcggagtttaagaaggacaggggagagggcctggcccgagtgctgtgtggggaggagcaggctgatgctgatgctggggcccaggtatgctccctgctccttgcccagtctgaggtgaggcctcagtgtctactgctggtcttggccaacagaacagaaatttccagcaaactccaacttatgaaaaagcaccaatctgacctgaaaaagctggggatcctagatttcactgagcaagatgttgcaagccaccagagctattcccaaaagaccctgattgcactggtcacctcgggagccctgctggctgtcttgggcatcactggctatttcctgatgaatcgccgcagctggagccccacaggagaaaggctggagctggaaccctgaccactcttcaggaagaaaggagtctgcacatgcagctgcaccctccctccgatccttcctcccacctccccctcccccttctcccacccctgcccccacttcctgtttgggccctctcccatccagtgtctcacagccctgcttaccagataatgctactttatttatacactgtctagggcgaagacccttattacacggaaaacggtggaggccagggctatagctcaggacctgggacctcccctgaggctcagggaaaggccagtgtgaaccgaggggctcaggaaaacgggaccggccaggccacctccagaaacggccattcagcaagacaacacgtggtggctgataccgaattgtgactcggctaggtggggcaaggctgggcagtgtccgagagagcacccctctctgcatctgaccacgtgctacccccatgctggaggtgacatctcttacgcccaacccttccccactgcacacacctcagaggctgttcttggggccctacaccttgaggaggggcaggtaaactcctgtcctttacacattcgctccctggagcagactctggtcttctttgggtaaacgtgtgacgggggaaagccaaggtctggagaagctcccaggaacaactgatggccttgcagcactcacacaggacccccttcccctaccccctcctctctgccgcaatacaggaacccccaggggaaagatgagcttttctaggctacaattttctcccaggaagctttgatttttaccgtttcttccctgtattttctttctctactttgaggaaaccaaagtaaccttttgcacctgctctcttgtaatgatatagccagaaaaacgtgttgccttgaaccacttccctcatctctcctccaagacactgtggacttggtcaccagctcctcccttgttctctaagttccactgagctccatgtgccccctctaccatttgcagagtcctgcacagttttctggctggagcctagaacaggcctcccaagttttaggacaaacagctcagttctagtctctctggggccacacagaaactctttttgggctcttttttctccctctggatcaaagtaggcaggaccatgggaccaggtcttggagctgagcctctcacctgtactcttccgaaaaatcctcttcctctgaggctggatcctagccttatcctctgatctccatggcttcctcctccctcctgccgactcctgggttgagctgttgcctcagtcccccaacagatgcttttctgtctctgcctccctcaccctgagccccttccttgctctgcacccccatatggtcatagcccagatcagctcctaacccttatcaccagctgcctcttctgtgggtgacccaggtccttgtttgctgttgatttctttccagaggggttgaacagggatcctggtttcaatgacggttggaaatagaaatttccagagaagagagtattgggtagatattttttctgaatacaaagtgatgtgtttaaatactgcaattaaagtgatactgaaacacaaaaaaaaaaaaaaaaaa

SEQ ID NO: 4263 - DNA, 358 bp, Homo sapiens
  misc_feature (1)..(358): n=a,t,g or c
cttggggagtctaaagaatgtatctctcatcttgtagaggtattaagtgattcgatttatttggtagattaaatgggcaggcattgtcaaatgtggcgatactgcatgggagggcactgtcaagtgaggtgacattagatctcatctcagttatatttatgggtatgttgttgatatgcgtgttccaaaaattgcatacatttatacaaatttaatatgatttgtaattttgatagttatggctaaatatttgcttaaagttatatttgtattaaacatgtcacggatgggctggggcacggtgggccacggcacctgttaatccccgggggtactcccgagggntggagggccaggg

SEQ ID NO: 4264 - DNA, 2000 bp, Homo sapiens
attttcctggggctccggggcgcggagaagctgcatcccagaggagcgcgtccaggagcggacccgggagtgtttcaagagccagtgacaaggaccaggggcccaagtcccaccagccatgcagacctgccccctggcattccctggccacgtttcccaggcccttgggaccctcctgtttttggctgcctccttgagtgctcagaatgaaggctgggacagccccatctgcacagagggggtagtctctgtgtcttggggcgagaacaccgtcatgtcctgcaacatctccaacgccttctcccatgtcaacatcaagctgcgtgcccacgggcaggagagcgccatcttcaatgaggtggctccaggctacttctcccgggacggctggcagctccaggttcagggaggcgtggcacagctggtgatcaaaggcgcccgggactcccatgctgggctgtacatgtggcacctcgtgggacaccagagaaataacagacaagtcacgctggaggtttcaggtgcagaaccccagtccgcccctgacactgggttctggcctgtgccagcggtggtcactgctgtcttcatcctcttggtcgctctggtcatgttcgcctggtacaggtgccgctgttcccagcaacgccgggagaagaagttcttcctcctagaaccccagatgaaggtcgcagccctcagagcgggagcccagcagggcctgagcagagcctccgctgaactgtggaccccagactccgagcccaccccaaggccgctggcactggtgttcaaaccctcaccacttggagccctggagctgctgtccccccaacccttgtttccatatgccgcagacccatagccgcctgcaaggcagagaggacacaggagagccagccctgagtgccgaccttgggtggcggggcctgggtctctcgtcccacccggagggcacagacaccggcttgcttggcaggctgggcctctgtgtcacccactcctgggtgcgtgcagacccttcccctccaccccccaggtcttccaagctctgcttcctcagtttccaaaatggaaccacctcacctccgcagcacccgacttaccaggacgcatgcccctccctctgccctcatcaaacccacagacccggactccctttctgccaccccaggctggtccggccccaggtgtggggtccgctctctccactcccagggctccgcgcccaagtgagggggcccctgccggagcctcagacacactggagttcagggctgggggggccttggcacatacctgtcccttggctatgagcaggctttgggggcccttccgcggcagccccgggggccgaggtagggtctgggggcttagaggctgggatggctcctggccccaccgccagggggcaagcgcaggccgggctgggaggcggcggcggcggctcgggctggggggtcaggtggacgctgcctccggggctggtcgcgcatccctcagtccctcggccacccgggggtcgctccctcgtgcccaccgcacctgccgagcctctttggacccagatctgttcatgcttttgtcttcgtcactgcggcggggccctttgatgtcttcatctgtatggggtggaaaaatcaccgggaatcccccttcagttctttgaaaaagttccatgactcgaatatctgaaatgaagaaaacaaaccgactcacaaacctccaagtagctccaaatgcaatttttaaaatggaaaacaaaaatctgaaagaaacgtctttagtggctttaagccccaaaacgtccctaaggcgtcctcgagatgaagacgggggggagcccccagccaggtggagaccccgcaggacgcggcggcgcccggtgaccgaggcctcgcacagccggccgccctgagggtcgggccggagccagggtccaagaggggcgcgtttgtgtctcgggttaaaataaggttccgtccgcgtgctgggtcaga

SEQ ID NO: 4265 - DNA, 1696 bp, Homo sapiens
ccgagtgtccacaccctgtgcgtctctctgtcctgccagcactgagggctcatccatccgcagagcagggcagtgggaggagacgccatgacccccatcctcacggtcctgatctgtctcgggctgagtctgggccccaggacccacgtgcaggcagggcacctccccaagcccaccctctgggctgagccaggctctgtgatcatccagggaagtcctgtgaccctcaggtgtcaggggagccttcaggctgaggagtaccatctatatagggaaaacaaatcagcatcctgggttagacggatacaagagcctgggaagaatggccagttccccatcccatccatcacctgggaacacgcagggcggtatcactgtcagtactacagccacaatcactcatcagagtacagtgaccccctggagctggtggtgacaggagcctacagcaaacccaccctctcagctctgcccagccctgtggtgaccttaggagggaacgtgaccctccagtgtgtctcacaggtggcatttgacggcttcattctgtgtaaggaaggagaagatgaacacccacaacgcctgaactcccattcccatgcccgtgggtggtcctgggccatcttctccgtgggccccgtgagcccgagtcgcaggtggtcgtacaggtgctatgcttatgactcgaactctccctatgtgtggtctctacccagtgatctcctggagctcctggtcccaggtgtttctaagaagccatcactctcagtgcagccaggtcctatggtggcccctggggagagcctgaccctccagtgtgtctctgatgtcggctacgacagatttgttctgtataaggagggagaacgtgacttcctccagcgccctggttggcagccccaggctgggctctcccaggccaacttcaccctgggccctgtgagcccctcccacgggggccagtacagatgctacagtgcacacaacctctcctccgagtggtcggcccccagtgaccccctggacatcctgatcacaggacagttctatgacagaccctctctctcggtgcagccggtccccacagtagccccaggaaagaacgtgaccctgctgtgtcagtcacgggggcagttccacactttccttctgaccaaggagggggcaggccatcccccactgcatctgagatcagagcaccaagctcagcagaaccaggctgaattccgcatgggtcctgtgacctcagcccacgtggggacctacagatgctacagctcactcagctccaacccctacctgctgtctctccccagtgaccccctggagctcgtggtctcagcatccctaggccaacacccccaggattacacagtggagaatctcatccgcatgggtgtggctggcttggtcctggtggtcctcgggattctgctatttgaggctcagcacagccagagaagcctacaagatgcagccgggaggtgaacagcagagaggacaatgcatacttcagcgtggtggagcctcagggacagatctgatgatcccaggaggctctggaggacaatctaggacctacattatctggactgtatgctggtcatttctagagacagcaatcaatatttgagtgtaaggaaactgtctggggtgattcctagaagatcattaaactgtggtacatttttttgtc

SEQ ID NO: 4266 - DNA, 570 bp, Homo sapiens
  misc_feature (1)..(570): n=a,t,g or c
cgaagtagacaaagacatggagagtgtgattcccaagacagactgcaggttacggcctgacatcagagccatggaaaatggagagatagatcaagctagtgaagaaaaaaaacgacttgaggaaaaacaaagagcagcccgcaaaaacaggtccaagtcagaagaggactggaagaccgaggtggttccatcaaggtcctaatccctacaatggagcacaggactggatttactctggcagctactgggacagaaattacttcaatttgcctgacatttattaaaatgcatacaagtcagggtgtttggctaatctacaaataagtcttaaacctatgtttttaaatttttttcccttggtttctacttatcttttaaaaaaaaaatgaaaaaacactcatgagataactgcatttcaccccaacaaaagcaggggtataaggcgntattgggtgatgaaagtccttagggaaaatgcataatttttgcnataaatggtacctaatttggggatacccantttatatagagggtaagagacactgcttgggggatatgccttttatgggt

SEQ ID NO: 4267 - DNA, 592 bp, Homo sapiens; identical to SEQ ID NO: 3353
  misc_feature (1)..(592): n=a,t,g or c

SEQ ID NO: 4268 - DNA, 797 bp, Homo sapiens
  misc_feature (1)..(797): n=a,t,g or c
nnnnnnnnnnnttnttcttaggctctttattagtttttcagcacagttaactctttctacgttgactagagttttgttttacattttatcatctcatgacagcagccaccagaatacacaaaattaggctctttactttgtgcggagaagaaaataataaacattaaaagttcaccttgaccaaagagacaacctccagaagaacaccacacatgggagaccccttcccccaccctccaccaagcacacctgtttctgtctcatagcacatgtgacaatcatctggacaacagccacaagggggcgctcggaccaggcagccactttcctgggtgctctctgggcccagctgggtgcttgtagggccacgcaggcagggggggtcaagggggtttcttctgccccaaggaagacagaacatggagaacccncccagggcaggaaccccacagattgtcccttccagnccacactcttgcacctcctggcctgtcccattctgagcaaggnctccccgaggagnngtgcctggccccttntcccanagnnncctnttgggtnngnaangnnnnnnnaccnntttnnngnnnntncccnnnngtttcantggnttnccgntantncaannnnnnnttnngntnttttcaannnnnnnnnncnnntnntntcannnnnnnnnnnnnnnnntnnnannnnnnnnnnnnnnnnnnnnnnnnnnnnnnnnnnnnnnnnnnnnnnnnnnnnnnnnnnnnnnnnnnnnnnnnnnnnnnnnnnnnnnnnnnnnnnnnnnnnnnnnc

SEQ ID NO: 4269 - DNA, 406 bp, Homo sapiens
  misc_feature (1)..(406): n=a,t,g or c
tagagacagggtttcaccaatttggccaggctggtcttgaactcctggcctcaggtgatctacctgccttgnctcccaaagtgctgggattacaggcgtgcaccagcgcccagtctaggatgtcgtttttctgatacaacaaaggataaggttttagaataatagtatgtcacaatatctttaaaaacagcaggtgcagtggctcacacctgtaagcccagcattttgggggttcaaggcgggaagatcagttgaggccaggagttcaagaccagcctggactgcatagaaagatcctatttgtacaaaaaaatgtaaaacttaaaattgcacaaaatttgtcacctgtaccagcttttagaactgtttatcttatcctcctcagtgatacatcatgaagttgtgt

SEQ ID NO: 4270 - DNA, 579 bp, Homo sapiens
ctgtcatgttactatcaatggtgatttcaatcgcaatattttaaattgatgagaatgatttgtaaacatgaagttactattacgtaaattctgtttgttatagagtttcttcagttgttacccaagtgtcatcctagagaagtcagaagaatcagaatccatcgtattttagagttatgtgaatctacatcataaatgggcattaacattctaaattgcttggtttggagaatgtgttagcagcatagctatattcaactagggagatgctaaatacacagaagtttcaagagccttggaacagaattacaggggaactatatatgtatatgtatattttattaaacacccatcctgcactatcagtattgcactaatgtggaatttgaaagactattttgctgatactgtatatatgcgcatcattcctggattagattgttgtaaagacaatctgaaagatctaaggttttaaaataatttgggtttgaaaatatacagttgtcctgaaggaattgctgtcatacatgaagttgctccgagctgtccttatcccctcctgggccagggtaaccaaaa

SEQ ID NO: 4271 - DNA, 477 bp, Homo sapiens; identical to SEQ ID NO: 2800
  misc_feature (1)..(477): n=a,t,g or c

SEQ ID NO: 4272 - DNA, 697 bp, Homo sapiens; identical to SEQ ID NO: 3856
  misc_feature (1)..(697): n=a,t,g or c

SEQ ID NO: 4273 - DNA, 5180 bp, Homo sapiens; identical to SEQ ID NO: 295

SEQ ID NO: 4274 - DNA, 7002 bp, Homo sapiens
  misc_feature (1)..(7002): n=a,t,g or c
gaattccgtctgagtggcgctcgcggcggccgcgccagtcgcgtcccccaccccaacccccaccccaacggccgcacgcgcgcggcggacggacgggcgcggcgcgtcctcgctcccgctcccgtcccggctggggcgcgtggccgtgtccgccgcgtgcgcgtgctgcgtccaacggcctcgcggggcaggagtaagccgcggccgccgcctgggccccagggcggtctctggggccaggggtcccgcgcccagcgtttcccgcccgccaccctctccgccacgcgcccgcggcaccttttcctcccctggccaagggatccagtcggttcggaccagaaggaggctttcgtttagggtgggggcagcactaaagtctgattggagtcttgcggtccgcgcgtcgcagaagcgccttcggttttgcagagagcaaagagggagcagcgagtgcacggagtggtagtaacaaccaatgttctttccacgccctcactgtgtgtccggcactgtgcggagccacttttctgcctttcatttgattcttgcagtgagctggcgaggtgggtacggctatcctccttccttagcggcccaaggcacgggtttggagagcggggtcacaggcacgcacgggaagggcggggatttgttgacgccgggccctctgactccgagctccccgcttcccaagcctgtttttagtctttgcccccagagcacttgtccctcggggcagtatcagcctcaaaaggccacctgccgagaaggctgcagcggcatttgtacttgggctagttctgggcttccagggagacaagggttggaagtgggaatgtgacaaaggaaaagggtttgggcttcctttctacgtgtacttgtacaggccctgggtagatgtgccgccaccgtagcttctggaaaaaagtagggaaaacgatgagtaagtgcaaatgaacatggactgtgttcctcatcgggtttgaatctcagattgctgatgggaaattcccgccagcgggaagttaggctccggttttagacgttgaatttttttttctctactttttttttaattggaggagacttttgcagaaagaccttgagaagattcactttatagttgaagggaatgaggtgcaaagcgacgaatttaagatctcactagcatctgtgggttaaaatacggaattggaatagaaaggttggcgcccagttacagtatacatttggacctctgtggagcgtgtcatgctggatgaattactggtgttggagatgtgttggaaaaaacaactgtgacagtcgagatctgtggatgaaagtttgtgtacactccgtttatttagcatttactctgctgggttcttgtgtatatgcagaaacaagatgcttttcttcagggactggagcttatatttttctagtagttaccatcttttagattatttaaaagccaacatactccttggcttagtgaaataaatcttctatgttatagaaacacttctataaacataaagatttctataatcgtgttctggaaaccctttctataaacatgtttctataacagtattataataatctataacagtattataataatgttccaagtaacatttacttggaactttgctggtgtggcgattccggttacttgcccttacagactggttactatgaatagcatttaactagactaaagttgagcaatttaagttgtcaaatgaaaacactagaatgacctacatttaaactgtttaagcttgagtccagctaattttattactgcttgaggcaaaatagaatgaaattaccttacacattattgagggaaaatttcgttagtttctacttaaaatattaaaaaaatacagttcttggcctcaggcaaatggttatcacttgggcaggaacatgaaaattacgtgattatttcacaaactggtgctctaactgattacttgtgcatttatcaggaacaagtgaattgaagcaaattgtggtaatgtaaggcttggcaaggctgccctacatccctaccaagtcatacgtcagttttgttggagctgcttaccggtacaaaagtctaagcttttgtacctcttacaggtagaaaagtagagagttctttgtttaactcagtttgctgttcctgagctgacactgcaccaggggaacattaggagattttggtaatgtttgtttgtgacctacttagagcagtttttgttttgtaacttatggtttttttttttcccactcgttctagtattttgcatagaaagtgaacggcagaaggcagttttaagtttttgtaaaagtttgtgaattttatatcgtccttaggactgatggggctagtgttaaaagataaaatttaacataaagcttacatttgtgactaaagccaattttatattttttttctttatttttgtcagtctgataaaactgcccacttggtcttttaacattttgcaaattgattttttttttaactttcagaatttaaataggcattgtatgtttgtttaattatattgtgctttggcttccttggacgaaactattactgactttacaaagaagaatggataattgtggaagtaggtaggtcaaaaaaaaaaaaggaaagcctcgcccgccccccagtaatttgtcaaaagcaagtgggaaaaatctctggtagtgcagtactgcccttccagtactccagtacaagccctggagttgaatttagattcagcaactattatcttacatgtagttggtgatcacaatgtggtggcacactaggtttataattttatatctcagaaatcagctatttacttttttttaaaaaagtattcttggacatcctgtctgtctttagttgggaaggtcaagttgcaagccaggtgatagggttaagagtaggaataattcacacacacgaatagtgtcttaatattctgtcttacaaggtggaaagcaatttcaaaaaaattgcccttacagcctgtagcttagtaaataaggtctttaggcgactttgtgatagagtccctcttctgtcaggtggccagtctgtcatgtaataagctcttggtatgtgtgttgtatcttaggtacttaatcaaaagtaaagattaaagatgattgacagaaatttggcttcctggatggtatacacatctacttagtagggatgtaatctttggtggctattaacttcactggctgtataaagcatcattatgtatttgtgtaaccttttgcatatttagagagtgctttcacacatctttggtattaccatacttttactaaaaagtgaattggagctctgaaaccgaattgtcaaaactattttgaaaagcatgtggtacctaatagggtactatagccagcttatttccttaattgaaaaatcttagagggattttgaatctggaatgtatgaatgtgacacctgcctgcccttgccagttctcccatatgctgtttatgcaaagccatagcgtgtgcttaagtacacccttgtttctgcactgaggttgcctagatttccctggagtgtatccacctgtcttgatctgtttaagaattttgcggatgagcattagtattaactgtaacatatcttttcacgtgatgagaaagaacaaagatttttttaaattgtgaacctgagtaggttttaactttggagtggggaagggatacactaagataaaagatagttgttaagtattctgattcctgaagttttttttctttcaggaaaacggtatttttgagataaagtaagatttgtggaagagttgcaatagagaggtcttgaatacccattatccactgttaacatcttatgtaatccaagtacatttaacagaactgagaaattaacatcgataaaatactgttaatgaaagactttatttggatttccttagtttttctactaatgtcctttttctgttctaggatccagtccaagatgccacattgtatgtagtctcctgatctgtgtcagtttctgtctttccttttgtctttcgtgaccatgacacttgatctcatttggatttgatgttaaggattagactgaagttacagatttttgggggaagaataccacagaaattacccttatcacatcagattgggggtccataatatataactggttgaatttaacctgatgatttggttcaggtggtatctgtcaggttagtgtttttttcccctttagatactattccttagatgctagtcaccaagtccagctcacactcaaggagagaggggaattaggctctactttctagagggaggagaatgtgaatttgtggaagtatattaaagctactgttattattttgggggagatgcttcgaagccatggaaataaagttcccctccttaattttagcattttaatggatctcgtctgcagctattattacttcggggttctaatggtgattttttttattttcctcattccttctacagtataaattttctgtgaggaagatttgtgtattcttcatgttttttctttttttcatttatatcactatagaccacggatattaattttattctttgggttgtaatccacaattatccttgctgatgtttacttatttttgattattatttattttatatttttataaaatatcgtccaggctgtctcacactcctgggctcaagcaatcctcttgtcttggcctctcaaagtgctgggattacaggtgtgagccactgtgctggccacagtttattttgttgttcatgttgttccagcttttttttttttttttggctcctttctccttttgacacttccctatcttatctgttttttaaaagcatgttttttctttcattaattaccaggtatttcaggctcatcttgcattttgcctgtctcaggtccagaatcaaccatttctccaaggaggcgtcaggaagaattgtgaagggaggtgacaggtggtaaatgcgaagagtttggaaaaatagattgacagtaggcccagtgatgttgatacttttcttgctctgagcacagatgttggcttctgtattcatgttactccagttctggnaaaagnttttgtttctaaattcccacgatttagagaaccagatatcaaatgtttgaatacatgacataatcctgaaanaaaatttacaaaaatttaatatattctcaagttagtacacacaaacacttgctgtttttccttggtgtttttgacaacttttttaaagtaaaaagaccacttaaatactatcgtactcagaattaacatttgacattttgcattgccctctaagactcctttttttctatacgggcttccattcccttccttccagggatctttttcacatctttccaggctgttttattgatggggaatttttaaaaatagctttattgaggtataattgacaataaactgcatgtttttaaaatgtactgcctgataatttcagacaccttttgtaatcccagcttctcaaaagactgaggcagcagagaggattacttgagcccagatgtttgagctgcagctgcagtgacctatggtcatgctacgcactccagcctgggcgacacaggagactcttaaaagaaggtatacccatgaaaaccatcaccacaatcaagattgtgaacctatccattacccccaaaagttttctcatgtcccttttccctctttcttgcttgttccttctacccttctccctgcaggaaatccttgatctttttatcactgtagattactttgcgttttttagaatttttttgtaaatacattatgttctttttttaattgctcagtgctagtctgttgtgtaggcatatcacaattttttggtttacctgttggtgggcattgaaaaacggcaaaagctgtgtgtttccagctttttgactgttacaaaataaagcttctgaactttgtgtacaagtctttgtatgggtatacgcctttatttctcttgggtaaatgcttaataggggaatgtttagatcatgtagtagatgtatgcctaacttttaaagaaactccctgttttccacagtggttgtaccattttacattgccaccagcgatgtttggggggttccagttctgccagtatgttggctaacagtgtgtatggtcagtctttttaattttagtcattgtgacaggtgtttagtggtacctcacaggttttaatttgcatttctgtaattgctagtgatcagcatttttcatttggcattcatataatttctttggcgaaatatctttaagtcttttgctcatattttatgggattggttacttaattattaatttttttgttttgagacagtgtttcgctcttgttgcccgggctggagtgcagtggcgccatctctgctcactacaacctctgcctcctgggtttaggtgattctcctgtctcagcctcctgagtagctgggattacaggtatccaccaccacacccggctaatttttgtatttttagtagagatggggtttcaccatgttggccaagctagtctcgaactactgacttcgggtgatctgccctcctcggcctcccaaagtgctgggattacaggcatgagagtactttatatattctggatagaggtattttaaaaattagagatatgggtcaggcgcagtggctcacacctgtaatcccagcactttgggaggccgaggcaggtggatcacttgaggccaggggttcgagaccagcctgggcaacatagtgagaccttgttgctactaaaaatttaaaaaattagccaggcatggtagtgtgcgcctgtagccccagctactcgggagggtgaggtgggaagatcacttgagcccaggagttagaggctgcagtgagccatgatcacaccactgcactccagcctgggtgacagagtgaaaccctatcaaaaaaaaaaaaaaaaaaaaaaaaaaaggaattc

SEQ ID NO: 4275 - DNA, 477 bp, Homo sapiens; identical to SEQ ID NO: 3357
  misc_feature (1)..(477): n=a,t,g or c

SEQ ID NO: 4276 - DNA, 406 bp, Homo sapiens
agatggagtctcgctgttgttgcccaggctggagtgcaatggcacaatctctgctcacgacaacctctgcttcccgcagccaggttatctcagaagccaattttccctttagggaaagttacagaatcagccagggaagaggaatgggaggatgggctggatgatccctgttcaggcctaatccgctggcctccctggggcctccctttctttgtgccaagccctgtgctgggtgctgggaactgggaacacagaatgaatcagacatagcctttgttcccatggggctcagtctcatggggaagacaaatgtgtatcaggcattattgacccaggatcatcagtgctccaataaaaagctcagagggtgggttgggaaggcttcctggaggaggaggtactggaa

SEQ ID NO: 4277 - DNA, 475 bp, Homo sapiens
  misc_feature (1)..(475): n=a,t,g or c
gttcaaaaattttttattaataattcattttcatagctcagaaaaggatataatcagtagaacaactaaaaacaaaacctcacctctacagagatagccagtgtgtagactttattacataggcacatattaaaaaaaaaaaaacataaactggttttacataaaattaaccacaatagtgcaagaggttacactgaatgagaatggatgatgaatgatggaaaatgtaaggcttggaacagctgaatcattcactggatcttgggttcatccatcctgacgcactgaaatttattacagacattacaagaatggagggtgaggaatggtgcttcctctgtcatcgcctgggctaaaacactgattttggatttaatcnccttggaatacggtagtttttctccagggttcccctggttnaggttaggacctaaaaggttaaatngaatggcngggcttaagggtcnaaaggant

SEQ ID NO: 4278 - DNA, 468 bp, Homo sapiens; identical to SEQ ID NO: 3857
  misc_feature (1)..(468): n=a,t,g or c

SEQ ID NO: 4279 - DNA, 410 bp, Homo sapiens; identical to SEQ ID NO: 3858

SEQ ID NO: 4280 - DNA, 405 bp, Homo sapiens
  misc_feature (1)..(405): n=a,t,g or c
tttgcacattaatgttcatgatacctttatttgtaatagccaaaaccaggagatagtaaaatgttcatcaacaaatgagcagataagccaactgtggtccatccatataacataattctactcagtaaataaaggcataaactacagatacacaatcaacatgaatgagttttaatattattatgtcgagcaaaagtgcaagacaagaaatgagtacagacagtaagattccatttatataaaattctaaaaaatgtaaacagtctatagtgtaaaaatgtaaatgtctatagaaaaacagattaggaattttctggggacgagggtgggatggcaggncggaggaagagggagggattacaaagtagcncgagaaaaccttttggggtaatgaatatatacatt

SEQ ID NO: 4281 - DNA, 492 bp, Homo sapiens
  misc_feature (1)..(492): n=a,t,g or c
aactttttaaacaatccattttaatcatctaaattatttacaatacaataacatggattcatcctttttaagacatgggattgtaaaaatcaacaagtgaatgatgcttcaaataatacatttaaatacattaatcaaattttttcagtgcttaaaactttttctccatgggacagcaggctctggacaaaagtgcctagcatacaagttttcccaatttccttctatcataccagctgcacataaaaaggttcatcacctcctgtctccaaagtgtctccctactgagtgttcccaggcagacaatagttcctgggatagtgctgtttggtaacagaaaagcccaagcgtagaggacagattaaaaggcagggaccagaccaccatgggatacaaatccccaagacagaggatgcccccatgcctttcccccatgaagccttatccngtctgcctggtatctcccatgattgccagggcatagggctactt

SEQ ID NO: 4282 - DNA, 470 bp, Homo sapiens; identical to SEQ ID NO: 3859

SEQ ID NO: 4283 - DNA, 395 bp, Homo sapiens
tttttttttttatcttaattgtaaaaggtttatcaagaaaaaagattcaaggagcagcatccaggaggagaccatgacccccccggggcaaggggggcagtggtgacacatgtcagcaccccacagcaagctgctggaccacaccctgacctgggtggggaggaggcagaaacccctcgggattgtaaacataggtcagagacagcacaacctgacggggagcaggggcccacattccagcgaggcaggcagagggcaggtgggcatggaatccctcgcatggctgggcaagcaggcccctgtctttttcctcttaggtttcccattgtgcaacaggaaggatcttgggaagacagtgccacagatcccaaaggaccctggggatcctggggttt

SEQ ID NO: 4284 - DNA, 227 bp, Homo sapiens
tttcagcacagagaggcttctttattccaaggatctgatgttgcaagatctaacatttctacccccaggcattctccacctgcccatccaatctgctaaatagaaatcatgattccttcttatagactcctccgccttcccttcttccttctttaattctgcagtggggccatggggagaaagagggaagagggagaagagtagctttctcactagtccccaggcga

SEQ ID NO: 4285 - DNA, 429 bp, Homo sapiens; identical to SEQ ID NO: 3126

SEQ ID NO: 4286 - DNA, 516 bp, Homo sapiens; identical to SEQ ID NO: 1700

SEQ ID NO: 4287 - DNA, 233 bp, Homo sapiens; identical to SEQ ID NO: 1702

SEQ ID NO: 4288 - DNA, 178 bp, Homo sapiens; identical to SEQ ID NO: 3130

SEQ ID NO: 4289 - DNA, 190 bp, Homo sapiens
ttttcttttcaatttccttattcaaaatgggtcaaacgtattttagttggaagccaatttctgagaatgtaccatagaatatttattccaataaatctacttactgcgaactgaacatactctcggcactgttttttaagcacgtacaatttggctatacattgggtggcataaacttcacttcttaatc

SEQ ID NO: 4290 - DNA, 430 bp, Homo sapiens
  misc_feature (1)..(430): n=a,t,g or c
gaaagctcaaattccagtttgctttatggatctgacaaaacttcgccaaagtcaccctgcaccaagcctgactctccagcccagctgagcnttgtgttctcaacttgggaggtgggtggcaggtggtctcggagtagggagctctatttacgcctgggtagagacttctaagctgctctgtgtctcagggtttctgtggtggataatcgaaaacaagactgagtcctaagcacatttcctgcacaaaaaatggcctctcactgctatggtcaggaatcaatgagcatcatcccaaatttgaatcctctaacccccgcctcaagagacacataaggctctttaacttttggatttccaaggctgatcagatgaaagtttcttcagtttgtagacttccagaggctatgtcattcctgaatgttaaggacaa

SEQ ID NO: 4291 - DNA, 406 bp, Homo sapiens
cagatatagataaaactttatttatacataaaaaattacactttaggaattctgttcctaaaagcattctcttagtaaagctcaaaatgaaaaggttgaaaggggcagtgaacagctttttaactgtgtacatactgcagtcacaagcaattttttaagctgcaaaaatcatctcttctaagtagcatgagcttttgaaactgcagacttaaatctcatgatggcatcaaaagccaaagcgaaataaatcaatattctgaaatagaagacttggctgtcgatgttaattgggtgctatctccaaccactttccatcatgttacttcttcctcttaggtgtaactcaagaaataacttttttctaataatacctatcactgcatggaaaaaatgaaaagagaagtga

SEQ ID NO: 4292 - DNA, 460 bp, Homo sapiens
  misc_feature (1)..(460): n=a,t,g or c
ttttactttttgaagaatatttattgacatgggaaaatgctcacaatatgttaaagaaagcaggatacaaatctgtaaatacagcatgatcccaatcttgtagtaaaataaattatatatgcatagaaaaaatacaggaaggaaatacactaaaacattaacagtgatgatctcaggatggtgggatttggggtaaattattaattttattttctgcattttccaaactttccacaatgaacatatattacttttataatcagaggggaagaggtcaatacaggtgacacctagtcctgggaggtggcgagactgatgtggcactaagggggtgtttagagtcacttgtactgcctcattctgtgtccncctttataaagaagggataataacacctggccctggcctggcctcccaggactactggggcatctgaaaggggtcacaatatctggtgatt

SEQ ID NO: 4293 - DNA, 425 bp, Homo sapiens; identical to SEQ ID NO: 543

SEQ ID NO: 4294 - DNA, 451 bp, Homo sapiens
  misc_feature (1)..(451): n=a,t,g or c
tctcaacatggaaaaactgttcaggcacaaagattaaacaagcccgcgttgcatcccttggattgtactgaatcactgggtcccccagcctccctacctacccctgcaccccagatctgccttccccatattcatggcctcctcctccaaagcagcccaaagcagcaatgatatttactattttatatcaatctcttgctatatatatatatatctatatatctatatatttgtctatcctatatatacataggattttaatgctttgaatgagtgaaggagtgaatagggaaagagcacatgagtgaggtgtaaatgtcaccaaatgcattaagggacatatttgtaggagctggacatggggaaagggactattaaccaaccgtggccnttgccaggctgggagaagttttncactgtgctggataaggcagtagcaagcaggggttgt

SEQ ID NO: 4295 - DNA, 399 bp, Homo sapiens
tttttttttttttttttgtgcaatcttgatgcagagctaaacagtcctatgaagagagacagtgtatcttttaattaattggcactgaaatttcactttccttagctgcattctagtagcttggccaagttatctcgtaattctgttagttcaaatatctttccatccagaatttctaagagtgtcttcaggttattgcgaaaagcttcttgttcattctgacttttctccagacgttgctctaagtcagacagttgtccctccaggtctttgttccgaatttctacttcctgtagtttctgagtcaaagaatccctctgttcttgtagttctctggcattatcaatttcttgttttaacctttctatttcctcttccttcagtttcagtgtctcttcc

SEQ ID NO: 4296 - DNA, 441 bp, Homo sapiens; identical to SEQ ID NO: 1492
  misc_feature (1)..(441): n=a,t,g or c

SEQ ID NO: 4297 - DNA, 455 bp, Homo sapiens
cggtgtagcagacatttaattcttatttgccaactcctgagctaggacctggtaacacaaagttaaataggacacgattctagtcctctaggcaccaacggtcttggaaaggaaggcagacaagtaaactggccatttcaatactacgtggtcgttacaatgctagaggtaggcacagggggcgcagtgcaagggaggaagggcgttaacatctgccacctacttccaggtgccaagcactgttatcaacattattccactttattccctggtgattatgaaaggcaggtattgatattcacacttaacagacgaggaaacagcctcagggagataagcttacttgacccagtctctctcctagtccatatcagaaccaagattcaaacaggttttgtttagaaaatctaggatttttcagccataccaaataaagtagcctcagggaatcaaag

SEQ ID NO: 4298 - DNA, 466 bp, Homo sapiens; identical to SEQ ID NO: 1097
  misc_feature (1)..(466): n=a,t,g or c

SEQ ID NO: 4299 - DNA, 397 bp, Homo sapiens; identical to SEQ ID NO: 2812

SEQ ID NO: 4300 - DNA, 352 bp, Homo sapiens
aaagtaatttctttattgagaaaataaagacatggttcctaaggaaaagggctaaaaatgaccatgtttcaagtacactagtgaatagcaagtgaaacaaaatgtcttaagcatctatatgtcttatcttagatacatacaactattgtaggaacattatttctcttatctctcaggaaacatatttagttataatatgaaaaaaaaactaaaattgagcttctaatagaaaatcaaaccctatcagaagaagagttacgtggagtaagcgattttataccgatgctggacttactctccctaccataaaatttggataaacaacaaacatttattaagcacctaccacatg

SEQ ID NO: 4301 - DNA, 483 bp, Homo sapiens
ttttttttgtttttaaactttttatttttaatgatgataaaattttaagctaatgacataattgctttatttttatttactcattcagagttaaactccctcaatttctgaactactcccttgctgagagtcaggttctcagttactattacaaaatttaataatagaactgttccatatgcacaagggaccaagacaaaggaatgggaaggctagagaataacattaacatccacacactgtgtactgtgctctctgcttgatgctttgcccacagtgataatttcttcatatagtgcaaagtagtttgtaaggtggttttaaattcatgaggtctcaagtactctctgccttataggacagatgtagatacggtttcggtttttctgtttttaacagttttataagagtacaagtgatgctgttttatttgaaggccgagagcttcggttcctaaccgaaattggctacctgggctctcta

SEQ ID NO: 4302 - DNA, 412 bp, Homo sapiens; identical to SEQ ID NO: 3363

SEQ ID NO: 4303 - DNA, 634 bp, Homo sapiens; identical to SEQ ID NO: 3140
  misc_feature (1)..(634): n=a,t,g or c

SEQ ID NO: 4304 - DNA, 436 bp, Homo sapiens
  misc_feature (1)..(436): n=a,t,g or c
tttttttttttgcacttccgtgtttaataagccacatcctcagttgagcctggggtgaaatgtgagatcctgactctgtgcagtagtattagtgggtgggccagggntgtgaataacatcatcctcagtacagctgcaattccagggcccctctaccacaaagatggcttaagcaaaggcagccagatggaagtatgatatccaacaggaaggaagtaggcaggggtcactaaagtggctggtggccagcagatggaaacagaagtatggccccgagggaaggaggcaggtccagggctacagtgctttcaggtactggtgtttctataggggcatttgccacccacatctttggaaactcccctggcctattgtgacatggcagggctgcctggttcttgaaggtagagaaaatgctagtggggaggagctgaac

SEQ ID NO: 4305 - DNA, 411 bp, Homo sapiens
  misc_feature (1)..(411): n=a,t,g or c
tgcacaaacagttttatttgatgaaccacagtgactaacaggatcagaagacagtgcagatattctgaagaaggcactgggggaggtaagggggtatcacagcaggcagcctnctctgcttctgtcccagttcacagatgagttccaggcaggaagtctctgcaggtcacccacggcggcctcagagggacaatttcttcccttctagaagcctcttccagtgttcactggatgctttgaggacagctctgggcagaggaggtgactctgtgaaagatgctatcttaagatggggagactaggctgtgaggagccccttcccctctcctcctccctctgcccccagagctggcgttcattccagggagggtcaagatgtccattcacatcaagctgggcttttcttatctc

SEQ ID NO: 4306 - DNA, 213 bp, Homo sapiens; identical to SEQ ID NO: 565

SEQ ID NO: 4307 - DNA, 253 bp, Homo sapiens; identical to SEQ ID NO: 3143

SEQ ID NO: 4308 - DNA, 468 bp, Homo sapiens
tccatgttaagaatattttatttgttttttgagattacatagtcattattgctgatctaatacaatcacttagacataaagatttccaagaacttctcagaaatggtgatctttagaagtgttattcctttcagtaagatgacagaactagatgattacgtatatagatatatagatatatatatatatatgtatatatagagtttagaacctgtccacatataatttgctggtgttgcctattttccttccgtaattttcctttattgaaaaagcttaatgcaacaatgcattttgattcctttttaaaaaccacggcaaagttaattttgagaaaaccacaggagcagcaatatcagatctgtttagagaaaagcgacgagcataaaagctttgcaggagtatgtggccatggggagccgtgctcatatgggcaagtaggatagggagggaggagagcagagggaa

SEQ ID NO: 4309 - DNA, 381 bp, Homo sapiens; identical to SEQ ID NO: 2816

SEQ ID NO: 4310 - DNA, 309 bp, Homo sapiens
gctttttaaatgacatttattttttctaataattcaagtacataacacattttcaaagggaaatttgaaaatactgaacaatgtaaagaaaagagatagaacttatagtcctatcattaggagataattattaagtattaacttgtgcgtacttatgctttcttttttcagcctatagcatctggtctcccatccaagtaataacctggatcaatcctgcttaagtttccaatattaggcattttcagggtgttgtgaccacagatgatgtaactattaacttttaaatatttttctggtctttacata

SEQ ID NO: 4311 - DNA, 447 bp, Homo sapiens
aaatcattcagtttaaggtcactagactttagatgagtgaccctgcaggtttataaggcattctgctcagcagtcttgtaaatagtcctatatgaaagagccatgctactgttggacttggtcccactctggtcaaccttgataacgtcatacgtggcttatggactggatagcactggattccgccgcagccctggccatactgtgccacacgttggaagaactgtgggatgtagaatggagggactccttgtcagacagtgacagcatcatagcatatgcctgcgatttggactttctgtgtaacggctgcttaagttcctctggcacatgggaagtactaaaagaagacagctcagcttcagaatattgattatcttccattttcctcattttgagggctatctgtgaagtgccttatatgatctagagcagaaagtccacttt

SEQ ID NO: 4312 - DNA, 469 bp, Homo sapiens
tttttttttttttttttttttttctgcttaaataccaatttattgcaaaccaacaccaaggagctggaatagctttgcaggctggacacctcactctcctcgggccctggacaagggaaatgagtcaccccgctttcctcggacctcagctggtgggacttagtggctggccaaactgcggctgttgtgtctaaaaagagaaaacaggcagggtgtgccagctctggagactgggccagtccagggtggtggctcagggcagagaatcacccaccagacagcgtggctcaacgggagcaaggcgcgcagggacaggctccacaaccacaccaagcaccgcagtgtggcaccgggaccagatgcaagtgctgttcctgccatggggccaatacccaatactatccctcagtcattcttcctagatattggtttgctgtttattaaagcagggcagggagtggggagaaat

SEQ ID NO: 4313 - DNA, 467 bp, Homo sapiens; identical to SEQ ID NO: 3372

SEQ ID NO: 4314 - DNA, 268 bp, Homo sapiens; identical to SEQ ID NO: 29

SEQ ID NO: 4315 - DNA, 342 bp, Homo sapiens; identical to SEQ ID NO: 1707

SEQ ID NO: 4316 - DNA, 379 bp, Homo sapiens; identical to SEQ ID NO: 3373

SEQ ID NO: 4317 - DNA, 325 bp, Homo sapiens; identical to SEQ ID NO: 3871

SEQ ID NO: 4318 - DNA, 393 bp, Homo sapiens
ttccttttaaaaactttatttaaatggagactcttagtcaaatgattggaaaaccaataacgaaaaatagttcttcaggttcttctcctggaaaggcggaggacacaccaaactgcactggccctgtcaggggacacggcaccctcgtgggaccaggctcagccctcggggtggcacgaggtcctgcaggctgcaggaccgtcacactccagccccgtctggtgacccaacccgggcccgtggtgcatgctggggaaggccactgcgaacccctgggcttcggctcctgaggaggcatggcccacaccctgcccggccataaatatatacagattcctgggcatccagggcaccaggaccgacgcagagctggggtcctgtccctaagcctgt

SEQ ID NO: 4319 - DNA, 351 bp, Homo sapiens; identical to SEQ ID NO: 3872

SEQ ID NO: 4320 - DNA, 433 bp, Homo sapiens; identical to SEQ ID NO: 1516

SEQ ID NO: 4321 - DNA, 323 bp, Homo sapiens
  misc_feature (1)..(323): n=a,t,g or c
ctgggtgcaagaggtttatttgggagccatcccaggaagcccaaggcgggggagtggggaagagagggaagggagagcccccgcagaagtacatgaatgagtgggttactgctgcgggcaactgggactccatcctgctgggcatcctctgagagtttatgtagaatacacttcagaattgtcctgctcaaggacaatgaagctgaggtcctgctccttattgactcagggttgctgctcctggggacattaaccccccaacacttctagcttncccagtgcactgactnagcacacagctatggccaccagggaaccttttt

SEQ ID NO: 4322 - DNA, 423 bp, Homo sapiens; identical to SEQ ID NO: 3382

SEQ ID NO: 4323 - DNA, 389 bp, Homo sapiens
taatatatgatttttattgaacatgttcacctttacattattacaaacattttacaaataaaaagtttttgtaaaaaaaaaaaaaaaaggaaacatttcctgaattatcactggatagttgaaacaaagaaataaaatatataaatatgaaggtcattctccaagtattagaacagaatacggatggaatcacttcagtaaagttattcataaacatttgcatggttacccacatactgtatcaccttccaaaaaatcaaacacgagaggaaggggaacctcaaatgagatgtcttttctccatgggatttggtcaacgcatatcagtaagataatttctttgctatatacacaacataaacatttgaaaatgcagaatacattgtgta

SEQ ID NO: 4324 - DNA, 517 bp, Homo sapiens
ttttttggaaaccgagtggggactttactgatagtgacagtgatgacttcggagaggctgacggccggtacttcagggtgtgtttcaaaaagctgcccctggagggaggtggtagggaggcggtggggagctgcactcaccccggcctgtcccctccagctcagccagcagtcacactgcccagatttctttcttttcctctgccgcctgctcagcccgctgctcaaggcctttgcacaggctgccgccttcctccgccaaggccagctgcccgatactggtgaggcccttgttcccttgcagtcctcgaggcaggctgtgtctgtgctgggtgccaggtctaggtcttctctcttctgcagagttgggctacacagagcagctgttccagttcctgcaggccaccgcccaggaagaagggatcttcggtgagtcccaaccagtcagcccaggctcctgcaggcagtggtgtttgctggtggctgctgcccctgcaggacagtgacacccaactcta

SEQ ID NO: 4325 - DNA, 271 bp, Homo sapiens; identical to SEQ ID NO: 3874

SEQ ID NO: 4326 - DNA, 363 bp, Homo sapiens
ttttttttttttttagtttgtaggaaaagtttatttaatggggagactaagacgatgcaagatggttactagaaaaacatctttcagtctggataaatacacaacaaaggatcatagctgaaataccagtgaccatcacaataggaaaggtggtcagcttgtggaattttccttttggtaaccttaagaagtcattttagcagtactaaccatacagtatatgtcaggcactgtaataaactctttacaagtggtacttcatttagtcttcacgacactgaggtagatactattaaatgtccccattttacaagtaaaaaaattgaggttagagaggccacagaaggtacctgaggtttggga

SEQ ID NO: 4327 - DNA, 436 bp, Homo sapiens
tttttttttttttttttgagggtagagcagcatctatttaatataatttttatatagaaaatacaggcatatttaaaaatggaaacatgtaagaaagtatgtcacaaggaataacaaaatatatcacaaaataaaaaaagtaaccccaagtaacaagtttactaaacaagacccagcaccatgttggactttctttgcataagttccaggatgcccaggcactaccgaggagagatgatcctgcttttgggagagccagatggtcgtgcagtggttaaaacccagtcctccttttcctggaacagttatgtcccgtccaagaagaaagacattgacatcgggttgggcttacacattttccaccattttaacagggagactggcaaacagctgtatgacagcgagaccccgtccagccaggcgggcagtcacactg

SEQ ID NO: 4328 - DNA, 358 bp, Homo sapiens
tttttttttttttcccagctaattattttattttgtatttgtagagacagggtctcactatgttgcccaggctggtcttgaactctcagtttccagcagacttcctgcctcagcctcccaaagtgagccactgtgcccagccagagcgtccagttccactggtgttgggtgaggcctagtgagagggtgggcagagggccttgttgaatctgaactgcagcaagggctcgcagatctcaaaggaggcagggaagtgtgctggggtcccgtcagcatcgcatgaactcagggatggctgcatttgaggccagggtcaggctgtcctcacttatcaggggacaagagctggctgatgccg

SEQ ID NO: 4329 - DNA, 379 bp, Homo sapiens; identical to SEQ ID NO: 3388

SEQ ID NO: 4330 - DNA, 515 bp, Homo sapiens
gcggccgctgtctgggaggggcccttctgagcgagcggagttcggcgtccagttgtactgcggccagcccagcttctccccatgcagctcgttctccgtgcggagcagtccagcagcggcttgaagtagctcaacatggccgaggcgctcatgttgggctggcccgtgatcagctgcatggcttccggccacggcctacgtgaagcccagcttcatggcggtcgcaggcgctgcccggcctccttggactggtagatgtcacacttgtgcagggggcccgtgtggcaggctgcctggcacagtgcctcgtggaactggaactggatgatgaagctgacgaagtacctgatgtaaggcacgctagaaggaatgtggaacttggcccctgggtcaaagtcaccttgagtcctgggcactgtggggcagaggcctggtacttcagcctgaggctccaccactcctggttatagttctccttggtgatgcttccatccaataccctccagcgcactgat

SEQ ID NO: 4331 - DNA, 358 bp, Homo sapiens
tttttttttttttttttttttaagatgttataagtttattctgaatctcattcaattgtgttcaatgtggctcaattctttacaaattaaaattcttgaatatatgttaaaaattaaacaatcttaatgtttcttccttaactagactggatacacgtctgtttaactacgcaaaaggtaatgctggcatggcttactgggaccctaagtgtggcgaagggactctgctccagtgaactggcgagtgtggaacctcctgacaccttctgaggacctcctgcctgccatgttgctgtggagctcgcactcctcaggcatcccctgatgttgagtgatacaaactctatcaccggaatcg

SEQ ID NO: 4332 - DNA, 274 bp, Homo sapiens
ttttttttttttttttaaacccaaacactctatccttttattccttcccaggctattgcaggaaaagtcttgtttcccaaacgctgtgcctttctcctcttgccttcaaccctggaggggcccaactacacaagtggcttatttggagaagggaatgaggttgaataaagaaagctcagcttccagaacaccacactctcttggttttctctgaccttaaggtaactccttctcagtcctttggctgatttcccatttcccagagagcccaagg

SEQ ID NO: 4333 - DNA, 281 bp, Homo sapiens; identical to SEQ ID NO: 3175

SEQ ID NO: 4334 - DNA, 390 bp, Homo sapiens
tttttttaaaccatttgaccatgttatattttaatttgcagagacaaaaatgacaagcaatttatttacataaaactgtacaaaagcaaattaaattatgcaaagtatttcataaatagttggacgagtgtttaatacatttcgccatgttaagcatagttgcgtgcatagtgactcataataaacgatgataaattgttctctgcttcactatcaacatccaagtagcagaacaatagtcaatgattaacattacaaacagatcgtaccacactgaacgcaagtgctttaaactgtaggaaaagtctgaaagtaaaccttaggtagctgaacaaatgatgcttcctccagatgttatcattataccttcacctaggtcacaactcacaa

SEQ ID NO: 4335 - DNA, 442 bp, Homo sapiens
agatttttttccgtgaaatcacttttatttttatttttttccacatagatgacttcatgtcaactacaaaaatcatgaaatgaagaactgattgtgaaactgcaaactcaaaatcactggagtgataaacaggttttcccccagatgacttaaaaaaaataaccaggataccatgaattcatgtttaagtagtaaacatgtcatatatttaaaaataataaatatagaatagcagtacagaaactaatagcataaacagcatgaagtatattttacttttaagacagatgaaatttctaggcacagctttaggcattaaagaggacacagaggcataggttagagtgcactgctctgtacaaaaatacagtctgaataaattacattgctagccatacaattagacgtcacttaccagtcagttcattgcatgtttaataat

SEQ ID NO: 4336 - DNA, 466 bp, Homo sapiens; identical to SEQ ID NO: 3178

SEQ ID NO: 4337 - DNA, 421 bp, Homo sapiens; identical to SEQ ID NO: 3878

SEQ ID NO: 4338 - DNA, 441 bp, Homo sapiens
ttttttgagtgaaatcaagtgcagttttatttaagaactggaaagaataatcagtatctgtgaaagaaaatccaatttagaatatttaaataaacatttatgtaaaaagaagagtagaataattactccgttcagttcctctccttgcaatgggataggctgcctctgctgcagatggctgggtcttccaaacccatgacaagtgccacggcctctgcagcagtggcccagagagtaggcacttcccagcatgacagagaggccgaggcattctaaccttgccaaaccactacaaaagcaaactagggtgggcaagcccaactacctaaggcaggaagaaagtgcagtgaagggacagtggtgtgctgtgcgtatcgtgggggtatcctaagcagctagctgttggcgagatcttaccaagcctgatcggctaacgcagct

SEQ ID NO: 4339 - DNA, 416 bp, Homo sapiens
ttttacaaatgcaccactatttactgagggttccccacacgtcagacaccctgctaggggagtccccaatgtcatggacatgccaaatgccagtgctcttcgccctctgagtctcccggagtccctgtgcctcctgcagtcagggtgacagtgtcagtcctgggcaagttgctgtgcctgagctgaaggggaggcctcgtcccgggcctgggccccctgccagccactgtctgccttgctgtctctgtccctcgcctcctctggtatcatgcgaggcactggctcatctggaagcagatgctctggatggggttgggcagccacacccgctctccaatctctccccactgtttggcccagtgtttctgtgagaggatcaggacaaaggcaagaaagcccaggaggttcactggctg

SEQ ID NO: 4340 - DNA, 195 bp, Homo sapiens; identical to SEQ ID NO: 3184

SEQ ID NO: 4341 - DNA, 263 bp, Homo sapiens
tttttgcagatagaaacagctttattttttccattcaggctttatcaaatagcttgttcaaaaagcatatacaagagcaaaaaataccacatgcagtcaaacttcttttgccttatagtcattggctttcttttagaaaagagtgtgcacttgaataacttctaattcaaacattttccaactgtttctacttcatttttcaagttagcaacgacagatacattttagttaactgtttcatattccttatctttattcatact

SEQ ID NO: 4342 - DNA, 406 bp, Homo sapiens; identical to SEQ ID NO: 2834

SEQ ID NO: 4343 - DNA, 123 bp, Homo sapiens; identical to SEQ ID NO: 622

SEQ ID NO: 4344 - DNA, 397 bp, Homo sapiens
ctttttttcattttttagtgcacatatgtcataataaagtaatgcccagctaagtgctataggggaaggcaaagtatgctggctggctataggaagtgacaccatacactgacaatcacaccatacaacagcgccaaacgactattcaaccacttatcagacacatatgaaaatccaaaatgttttattttatttttttttccttaaatagagataaccagtaaacaattttcagaacttggaagtttaaaaacgtgcatataaaaatgggcattatatactttttattgaatgtggattgactgcagtctgctaagaaaaatggggtgtgggagctgaagaaaaaggaagttgtctttttttttttttaaggcttgcttgtgaaaggaacagttgt

SEQ ID NO: 4345 - DNA, 358 bp, Homo sapiens
gttccaaatgtttaattttttaaaatagacaactacctttataaatcatacacctaacttaaatgtttttttccaattaaaggctgatcttaagaaagctcaggggatagcaccagaagataaaggtaagttggcagcttttgtagtgaaagttaattttgttatttaaatacttatcctcaggaaccattgttcactttgccagattttagatgtttgttcaacagacactacagaatgcctgctgttgggccaggcattatcatatagcaatgaacaagacagtcaaagtccctgccctcaaagagcttacattctactcccattcaagaatatagtagtttttcacgttatttat

SEQ ID NO: 4346 - DNA, 311 bp, Homo sapiens
tttaagtgcctatgggctaagtcttttaagacttcaaaatatactcaaatgcttaaattatgacagcaaagacttaatgaaggtgttgagaacggagttgatacaaaattaatacgttactttgatagcttagcagaggcctgcaacagcttttatcaagagtagtgtgacttttgctgaaacagcagttttcttcatggaaggaattttatagcaggggcaaaatatatagaaacaatgaaaaggtttttagaaaaattcccttaagatgttaattatagaattatcttgatcatttgcacaagaatttt

SEQ ID NO: 4347 - DNA, 350 bp, Homo sapiens
tttttttttttttttttagtcttctctaattttattacagggcatgttggggacacgggagggaagtgttagaggagtgacagggcagcccggggccctctcccaccctgagcctcgaggcctggcgggggacatgaactgcagaggcatcagataaggcctcagaaagcccaggccatcattttccatgggaccaggctggctcaatgtggaactggccctcccagagcagcaggagaagggctcgcatgggctgcccccgtcacctgtgcctgacaggatggcggggaggcagagagagagcatcagacgccctccctccccataaggggcatgggggatggggacac

SEQ ID NO: 4348 - DNA, 374 bp, Homo sapiens
ggttgcaacatgtttaatttctgctgttcacactggacactgcatcatactagtgtcggcccctgaggcaccccttcctcgcctgcacaaaggaggacgagagatgaacattcagaggcagaaaagggcaataaaaaaagagctgtgtatgtgacctccaactactcagaggtgggggaaaacagccccatctgtcttgcactaaaaggctcaccaagggcaggtgaggggcaaatggtaatactgggagggggtaacacaaggagaagcgacatgagtacaccaagatgtcaaagctgcgacgggctggatgagggagccccaagagggcatatgctcagggtgccagccggctgcttttccttgtgacagcc

SEQ ID NO: 4349 - DNA, 395 bp, Homo sapiens; identical to SEQ ID NO: 3188

SEQ ID NO: 4350 - DNA, 288 bp, Homo sapiens; identical to SEQ ID NO: 2840

SEQ ID NO: 4351 - DNA, 207 bp, Homo sapiens; identical to SEQ ID NO: 3401

SEQ ID NO: 4352 - DNA, 418 bp, Homo sapiens; identical to SEQ ID NO: 2842

SEQ ID NO: 4353 - DNA, 328 bp, Homo sapiens; identical to SEQ ID NO: 3192

SEQ ID NO: 4354 - DNA, 357 bp, Homo sapiens
aaccaccattgtctacacctttttaaaaattaagtttgttactaaaagtccaatgtcattcacttgtatttatgatcatcaaatggtaattagggcaacatatgtaaacgcatgcctctgaatcagattcatgcagtgttaattatctgaataatttatgacattctcccaggttatttgaatggtatctttggagggcttactcaaatgaacccacaatacctccactattacagcttataggaaattacaatccactttacaggcctcaaaggttcattctgtggcccaaagcccatggaggggaagggatctaaaggtgctcatgtcaagttattttacttgttttttactgtc

SEQ ID NO: 4355 - DNA, 379 bp, Homo sapiens; identical to SEQ ID NO: 3403

SEQ ID NO: 4356 - DNA, 317 bp, Homo sapiens; identical to SEQ ID NO: 3884

SEQ ID NO: 4357 - DNA, 378 bp, Homo sapiens; identical to SEQ ID NO: 1720

SEQ ID NO: 4358 - DNA, 199 bp, Homo sapiens; identical to SEQ ID NO: 3886

SEQ ID NO: 4359 - DNA, 395 bp, Homo sapiens
aaagatgaggatgcggactccaataaaggcattaagaaagtactagatgaaaatgagaaatatgtgaaggataacatgtgaaatgtacactcaggtctaacaaatacctattatttctctggttaagaaggtttagcaggagcctccaatgagcactgtatgtagagaaaagggaaggagcaggaggaggaacagatctgcacagaatttttttcttaaaaaccacaaagggtgacttttttcttctaagcaagcaagcctgagaggcattacatgggctggctcctaatatcaaaacaaaatatttctttgccacaaaggaacttgactatgtagcaacacatttacaaaactactgcaaaacactcccagagggcagtgacctactctgctcc

SEQ ID NO: 4360 - DNA, 529 bp, Homo sapiens
tttttttttgtcccctttaaaacaacaaaggaaaaaacaaataaccagagatgacgatcgaggctctacacacgtgctgggtttccgtaggacatgctgctatggaaacgcggtgcagcagccccccagaggcgacgcggcgcgcatgcgaggtcgagcgatccaggcagctactcgggctccatggcctcctccggccgcagtggatgcatgcgtgcgggggagccgggggcgggggcccagcaactttccacgcagggactgcctctcacaagagcacttcctcctcccccacggggggcgggtcggtgccctggaggttgtcttcgctgccttgcttcgtgagcaagtttccaggcgctgacagtgagcgttcctcccgccggctgccctcgaatgggttcccaaaggagcgtttacgtatcatggtcttcaccaggatcacggttgccaagctgggaatgtgtttgactgagttctcgacctcctcttcagtcacttcgaccagcgtgcagttctcatcctccga

SEQ ID NO: 4361 - DNA, 428 bp, Homo sapiens
caatctgtagctggagctgatacaatacaatgtttacctggccaaagagggttcgaggggacaagctggcctcacaataagatgcacagtgttagctaggtcatcgtgacaggcatgcctcacaccaagacggactatcaagacctgagccgacctgacttacataaatgacaaacactagtgctttacaaaggtggctggagttctccatcttctaaaatcaacatccaatccccttcagtcagcatcttcagtattcccttgaggactggaaaaccaaagcagctacgtccatctgtaacgcacccgcaccggacaggcacgagatgtcacgtccacctggcaccatccaaagagggtaaattggagaaatcacacctttcaaatgttaatctgacactgtaaacagcagttgagttctcatttac

SEQ ID NO: 4362 - DNA, 461 bp, Homo sapiens; identical to SEQ ID NO: 3887

SEQ ID NO: 4363 - DNA, 252 bp, Homo sapiens
cacaggaataataaatttattataatcacagatggtggggtagtgcacataaaaaggggggacctcttctcaccagagggtgctggccggtgcccagagtggcaggcaacatagggaggcgctccctgcatggcccggcccgctgccaggcccgctgtctctgggtgctcagtgtgtggtgctctgaggacacgggtcctgagggccttgctcttcatccttcacagtggggacacggccctcatgccagcg

SEQ ID NO: 4364 - DNA, 423 bp, Homo sapiens
tttttttttgtattgcaaaatgtacagcatttattcacatacagacaaaaaggcacaattctactaaatagttcaacaaaaaaatacagctgtcctcaactagttttataaatactttcaaaaagggggtagaaataaatacaggattgggtcatgtaatataaaatagtcatctctacatatactttgatttttaactcttcatgcacctttttttttttcaattttagctgaatggacaccaagctaggcacatagtgaaaaatcctctgtacaaggttacaaatgtaatgacaagtttgtccatttcaaaataagatttgtacacaacacataaaacccttcatttagatcttgtgtttataacctaacaaatgacattccaggcaactttacaaaagtttaactagcctacattttgac

SEQ ID NO: 4365 - DNA, 454 bp, Homo sapiens
ttttttttttttttttttttttttttttttttgcagacacagacatcatgtgaggtatttattttgcagccattcagttcagctgtccagtatcaggttaccaaagacaaattttcaagctcccggttaatccccaccaaagtttctactgttcggctacttcaggatggctaacatttggagagaagaggatcccccaggtagtctgtacataattcagagagaggacatcagaattttccatggttctatttcaggtattaaggtaccacagtgaagcatgtcatttgactgtggtggcaaagggacggcactgagcatgcctaacctattccccggcatttcagtccaatcagcgcatgctcgcaatgatcatccatgggtgaaaaggaagagctgaaagacacatgtgctgagcaacatttaatttctgcttgttaaacgggtgattagg

SEQ ID NO: 4366 - DNA, 488 bp, Homo sapiens
tttaaccggagtccggttggttaattgaatgcaaattcattcatagaaaacggaaatgcaaccatagcatggagacgctctgagaaaagatccagacccacttcatctcccagcccttcaagcagactattaaaaaaaagtttgggagaaaaacacattcccatccccaaagcagaggccccgcttgagctcccccatcctcagcatctggggtggaccaggtgggacgaaggggatccaaggaccagggtggccagggtgcccagagctggggcaattctttgtaaactccaaggtttcataggtatgtgtgtgcatgactaacacagaacttgcctgaagactggacggaaacttagaagccagccctgggtcctagagcgaggctaggactgggcacgtagagggaaacagcacatcccttcctgaagcccctttctaaggtaggcactggggtgccacagctatggaggcagaacgggctgaac

SEQ ID NO: 4367 - DNA, 383 bp, Homo sapiens; identical to SEQ ID NO: 1148

SEQ ID NO: 4368 - DNA, 310 bp, Homo sapiens
agaattaaatctgacaggaaaacctaggrgtttttattagtaccattattgttttctttggctccatgtattatgtcggtaaaatgacaaaaaaaaaaaaaggaaaaaaattktaaaagacaaatattttgtacaaaaatacaaagttttaaaagctctttaagtatatyccatattatyactaatagtyggccyatatatcttatgcctgcatatttybcctacacttggwttttagaaatgtatggcactktttacacagtatatgcttavgbbctycccataactcavsgcccaatgatamcctttt

SEQ ID NO: 4369 - DNA, 297 bp, Homo sapiens
gattatgaagacttttattaaattacagtgtattacagattatatcataataataagcctttcatctttaggctaatatgatacaaaaacctacttggccacattacttcttgagtttcttttgggcagctttcttcttgaccatctgtaatcgcttcatagcattgagctgtgattcttgtgaagttgggcctttaagggatgctgagggagagctgctggattctgaagtagttttgctggtagtacttccactaggtcctgatgttccactatttccattcccacttagttggc

SEQ ID NO: 4370 - DNA, 298 bp, Homo sapiens; identical to SEQ ID NO: 666

SEQ ID NO: 4371 - DNA, 265 bp, Homo sapiens
  misc_feature (1)..(265): n=a,t,g or c
gaatgaaaagggcttttactttctttttaaaacaagtgattttnaagggtttgtagaaaaagcaaagaaaagcataattctcctcttacttcaagctagtgtctgatgagaaagtaccaggctaacctctgaagaatcctaccccaacaccttcttctttcttctgctgggatgaacatctaggggtaagatatgactgctctctaccatctggggacttctcttctttatattgttgcattcctcaatctttgcataaggaaga

SEQ ID NO: 4372 - DNA, 305 bp, Homo sapiens; identical to SEQ ID NO: 2145
  misc_feature (1)..(305): n=a,t,g or c

SEQ ID NO: 4373 - DNA, 243 bp, Homo sapiens; identical to SEQ ID NO: 3230

SEQ ID NO: 4374 - DNA, 375 bp, Homo sapiens; identical to SEQ ID NO: 3418
  misc_feature (1)..(375): n=a,t,g or c

SEQ ID NO: 4375 - DNA, 238 bp, Homo sapiens
  misc_feature (1)..(238): n=a,t,g or c
agcaatacatgtttatcatagaaatttaagaacctaagtaatacaaagaaagtaaggattacctttaattaagaacctaagtaatacaaagaaagtaaggattacctttaatcaataaacaaagataaacttttggagggagcatataccattccagtcactangtaaggttttaatattcagattccagaattctgatcaatcaatggctatgtttcacacttctttaaattaaaaa

SEQ ID NO: 4376 - DNA, 377 bp, Homo sapiens
  misc_feature (1)..(377): n=a,t,g or c
ttttttttatttaataacattgtttaataaaaaactacatatttaacagaaaagttgttaaagctccaaggtaaaggcacattgaaggagaatgctttttaaatccaattttcagggaattcactttacatgtaaataaagcagaaaatgcaggaaaattattttgaagtttttcatcacttaacaatttctgggaaacaaagttcatcctattttcccatagaggacccctgttaaaatataagattatattcccctatactagggattcaggcattcaaataaatcactagtccaacttcaatgtcgtaggaacccnagaanaatataactatcctaaaaatatataatttaaaatattaatttataggttatac

SEQ ID NO: 4377 - DNA, 478 bp, Homo sapiens
  misc_feature (1)..(478): n=a,t,g or c
tttttttttttgttttttccataccttttattgaactctgcagacttcattaagggaccatttgcttagaaattcttaaacatttggacatattttacaagacaagacagcagctggaggtcacacaaagatcacaatttcatctcaccacatgcataaaaagacactgggatttgtgtgtgtgtgtgtgtgtgtgtgtgtgtgtgtgtgtgcgtgtgtgttgcgcacatgcaatgtcttattttcacctttacaggaaggactagagacattaactgacgagagatgaataggacccacgaatgcacccccgagaaaagagtggctgaggacattgggtcatttatgggctaatgtgattgggcttggcccctgttcaaggttgaggtgatcagaatggntttactgggcagaaaagccccaacctcacacgacgggtttcccggggagagacagggtcttagctgatggggatctg

SEQ ID NO: 4378 - DNA, 367 bp, Homo sapiens; identical to SEQ ID NO: 2858
  misc_feature (1)..(367): n=a,t,g or c

SEQ ID NO: 4379 - DNA, 475 bp, Homo sapiens; identical to SEQ ID NO: 2153
  misc_feature (1)..(475): n=a,t,g or c

SEQ ID NO: 4380 - DNA, 347 bp, Homo sapiens
  misc_feature (1)..(347): n=a,t,g or c
ccaagnaaantnattgtattctccctaacaacaacaaaagagacctaaatgggctgctccctgaagagagccctcagctcttttaccgtgatgcacactcggggctgggtntaggctgtgtgatcaaatgtatgaaggaagaaggaacggagagaacgtgggcaatcaaggcctgggcactgccctacaggaggcttacagggtcacactcccaggaactgtctctatccccatgcctctcctaggtaaggattcattacctatgggtttcaaaggaaagtgcagtttctaggggagtgaggggacacggtggaaattccaggaaattaaagggccaggnaaaccac

SEQ ID NO: 4381 - DNA, 400 bp, Homo sapiens
  misc_feature (1)..(400): n=a,t,g or c
agnntngagnntcccgcctntttattacatcccttatgcatacagaattcacactgatttcagttaaaagtcaaagtggcatgcaagtagggcaagggtggcccctacataaatatagacatagccatttgttgagaaatttaagtgttcaaaacataaccaagaacacttatcaggtattgaaaagctagaggccagccacttctggttcttagttccccttgtaactccttataattttcaaatgaggaagtatcagtgtattctcccaaaccactctaaattcattaggtaacattttctaccatccttctggcaaacattttacatacatcatgagggaacaaaaggaaaggtttcatatataactacgggctcccccaaaccaattggctactca

SEQ ID NO: 4382 - DNA, 414 bp, Homo sapiens; identical to SEQ ID NO: 3234
  misc_feature (1)..(414): n=a,t,g or c

SEQ ID NO: 4383 - DNA, 333 bp, Homo sapiens; identical to SEQ ID NO: 2862
  misc_feature (1)..(333): n=a,t,g or c

SEQ ID NO: 4384 - DNA, 372 bp, Homo sapiens; identical to SEQ ID NO: 3419
  misc_feature (1)..(372): n=a,t,g or c

SEQ ID NO: 4385 - DNA, 279 bp, Homo sapiens; identical to SEQ ID NO: 3894

SEQ ID NO: 4386 - DNA, 459 bp, Homo sapiens; identical to SEQ ID NO: 3247
  misc_feature (1)..(459): n=a,t,g or c

SEQ ID NO: 4387 - DNA, 413 bp, Homo sapiens
  misc_feature (1)..(413): n=a,t,g or c
tttttttcaccaaggaagaaatacctttattaggagtctaggcatgtcagaaaaacccagttcagtcacagaaaaggaggcaaatattggtacagagcaagaatccaagtgtgaaaataaaacctccatctaaatatcctaacagaaatgctgctgaatttagcccaggtgaaacttctgaaagcncctggtgaaatgagatttttgcataaagagagagctctccagcactgctgcatctgagcttcttataaagtgacaggtcttggccagcagtagaggaagagataaaggggatgtctcatcacccaagcaaggtcgtctgtgttcaagtgagagaagaaccttagggttttggacagagtaaactggggcagcagagggaaaatggctnaggaaacnccacgtctagg

SEQ ID NO: 4388 - DNA, 262 bp, Homo sapiens
ttttaagcaatgaaatattttatttgctgaaataggtataacacttaaataaaaattaaacaaatgtttaatatctccttccatgaaacagcagcagcaagagatagcaagtgttcggaagtctcttcaatccatgttattctgatgactctttgaagaaagaacttgaacctcctgcacagggggatttccttcactcatagattcccctaacttcatctcctcttttccttgggctattagtcagtcaatatgcttgtga

SEQ ID NO: 4389 - DNA, 445 bp, Homo sapiens; identical to SEQ ID NO: 178

SEQ ID NO: 4390 - DNA, 473 bp, Homo sapiens
gaaggtatttttaaaatctgggcacaccatatctatctgtaggaccctgggtcaaaggtcctacataactgatatgaaccataattctccatattaacaaaggctcggaaattgaaaccaagatcacctaactcgctcactttggccaatatagtacgaatttcagcttctttacaagagaagagtcctgagatgttaatatgcagcaattctgctgatgtgcattttaactttatgcaccaaggaagaaaggctaaggaattcacaaaagtaaaatcaccccctgaaaaacagatgctggtgattggagaaaaaagagcagtagaattaaggtgttttataaaccagagagtgttttgtttctgataggtaaagggatttcttcatatgttattttaataaaagggaatttcataggtaaaaaccaatattcaaaattataaaacaaatagaactgtttgtgcacaatcact

SEQ ID NO: 4391 - DNA, 378 bp, Homo sapiens
atctgtaatagtttattttaaagactttacatttacaagtagaaacaacatgtgttatctgtgggtaaggtagagcaggaactctaatccaagggtgggggagatcagttggttccttcacagaaaataagcctgttgtgtgggcatcttgcttgcctgtagatctttgttcccagttcaggaggtttttattcagtgcttgcttcatttactggaaaagttcactgggcccacctgtcaactccttcccccacagcttccagctcagcagcaaactgtagggaacagatttactccccagttcctactgtaaataatgctttaagaacagcattccttttggacagtatgtcatagacccaatttttaatactccca

SEQ ID NO: 4392 - DNA, 387 bp, Homo sapiens
aatatagaacagtcaggttttattacttttaagtaataaagagccttttccttgcttttcttttttccctttttttcttttcttttttcttttcttacaacatacattaagtcgtgaatcagatgttaggggatgtggagatggaaggaaaattcggtgacatcacaatatttttacaactttacaacaaatataaatctgagtttgttgcatctaccagtgtctagcaagggtggaaagcaaaggcacactcgggtttatggaccctccccccacacacagtggggaaaaaaaactggggagaaatacttaaatgcagaagaccagctcaatacatgtgggtattttagggttaacaccagaagtgatgggttgtgggggtgtagg

SEQ ID NO: 4393 - DNA, 396 bp, Homo sapiens; identical to SEQ ID NO: 2163
  misc_feature (1)..(396): n=a,t,g or c

SEQ ID NO: 4394 - DNA, 419 bp, Homo sapiens; identical to SEQ ID NO: 3257
  misc_feature (1)..(419): n=a,t,g or c

SEQ ID NO: 4395 - DNA, 268 bp, Homo sapiens; identical to SEQ ID NO: 3425
  misc_feature (1)..(268): n=a,t,g or c

SEQ ID NO: 4396 - DNA, 320 bp, Homo sapiens; identical to SEQ ID NO: 3427
  misc_feature (1)..(320): n=a,t,g or c

SEQ ID NO: 4397 - DNA, 454 bp, Homo sapiens
  misc_feature (1)..(454): n=a,t,g or c
cagttgcagttgaactttattcatccgttcacacctgggtccctcccggcccccacctaccctggccctgcctactcagggcttccaagattgggtgtcggggtggctttgcttatcctccagatgccttcttcccaggatgtgatccgtgccctccaggatctaagggatgaggactaaaggggtctgttcctcctccaggcagctggcatggaaccgtccgtctcagcggctgcttggtggttgccgttttgaatggntgtggctctctgtttgctggggggtattctgccaggatgtataggaagccacccagggctgccactgctgtgntngtgttgtgggaggagcagccatctggaaattgtttttctcgcctcttcactctcctcgaaaaatgctgctgatattgaatagctttagataattcttcatcttcagcatcaggctcccc

SEQ ID NO: 4398 - DNA, 527 bp, Homo sapiens; identical to SEQ ID NO: 3263
  misc_feature (1)..(527): n=a,t,g or c

SEQ ID NO: 4399 - DNA, 529 bp, Homo sapiens; identical to SEQ ID NO: 204
  misc_feature (1)..(529): n=a,t,g or c

SEQ ID NO: 4400 - DNA, 215 bp, Homo sapiens; identical to SEQ ID NO: 3267
  misc_feature (1)..(215): n=a,t,g or c

SEQ ID NO: 4401 - DNA, 440 bp, Homo sapiens; identical to SEQ ID NO: 3269

SEQ ID NO: 4402 - DNA, 378 bp, Homo sapiens
  misc_feature (1)..(378): n=a,t,g or c
tttnnttnataggatcttcctatgtttcttaggctggtctcgaactcctgggctctagtgatcctcccatctcagcctcccaaaatgctgggaatacaagcatgagccacagcacctggccagtaatattctttttaatattaatattctttggctcattaatcctactagaaatctatcctgaggtaacaatcagaaatgcaaacaaatttggttcaaagatatttacttcagcaatatttatgatgggcaaaaccaggaaatactacatatgtccaataatagaggggccagttaaataaataatatacccgttaaataggaccatttatacaactgtttaaaaatgggngtgttccaaattttaaagggggttan

SEQ ID NO: 4403 - DNA, 460 bp, Homo sapiens
  misc_feature (1)..(460): n=a,t,g or c
tnnnntnttcagacagggtctccctttgtcacccagtctggaatgcagcctggcaacagagcaagactctgtctcaaaaaaaataaaaaaggagcaaggagatgactaacaggtactggaagccatgctacaaaaccaagaaaggagaggcagcttttctttccctcagcacagaagaggggaaatgcagttgcatgggggctaggggagcggggaatgaaancgggtaggaagggaaaactcccccgaattttatagcatcccactttcacagcagcttaaactttttaaacattacttcacctcgaggatggggtaaaccncttttctcttgaatggggttgccctgccatttctcccttttgggcccccacccccacacaaggnccatctttgatccacttcctnagggggggnaatcaggttcttccaagggggatttaaaatccaccattacccc

SEQ ID NO: 4404 - DNA, 418 bp, Homo sapiens
  misc_feature (1)..(418): n=a,t,g or c
agacaagccaagaaatatgtttctttattttcattcccatatagcagagatggaaccaggacagtgatgctggaaaagcctgcctcgatcaagtcatcacataagttaatgtcagaaaacctgtatttgaatttgactcctctatccttactctggaaaattggacatcttgacccagtggctgtgagggctaaattagatgatgcagaaagtgcttggcatgcagtagatatgcaaaacaataacttatgacactctccaagcaggggaaaaaagtcttcatgccttctaactaataatacaaacgtatgcagtgtctttccaccctggggctttgagttttaaccaaataccaaattggaatagggnaaaattaggtccaaactcccattnaaccaggttttattaccanttccaa

SEQ ID NO: 4405 - DNA, 177 bp, Homo sapiens
tggaaagagctgggggagcttaagcagcgagtgtggccctctgcttccgggcacgcccacagcaactcggcttcagagtctgacccgcagaagttctttaaagagagggacttagggaccccagatcccggcagccaggcccagagagggaagcaggattagtcaaaaacaggtgga

SEQ ID NO: 4406 - DNA, 320 bp, Homo sapiens
  misc_feature (1)..(320): n=a,t,g or c
tgattnnaacaaatatttattgaatacctactatgtctgaggcactgtgtacaatgaagaataatacaaacacattgtactcccctagagctacaggttagctctgggcacagtaatacattattacataaaataatgagactgattttcttgggtggcttatgaaacctaatcccattttatgtgagcatttggattttgttcagtgctcttgacatcttcataaaccacctgatcatgcattatatagagacattgtttatccttttttcacgtggggcccatcgaggcaaaaacttgactaggaactaggttggggg

SEQ ID NO: 4407 - DNA, 291 bp, Homo sapiens
taattactttattgagcatctgcaaggtgcacatcattgtacatagcttgaaaatgtcaaattgagttttgtcacaccctctgtaaaggcttccctaatttccatggtttcgtggtttttcttcctctgttccaaggaacatgttattagtacctttactgcagcacttacttgtccttcatgtgttacgattgtaccatgtgttctctccactaggttttgaactcctcaaagatgaaatccatgcattgttcatctctgcaaccttgatgtccaaatacggtgttttga

SEQ ID NO: 4408 - DNA, 195 bp, Homo sapiens; identical to SEQ ID NO: 2878
  misc_feature (1)..(195): n=a,t,g or c

SEQ ID NO: 4409 - DNA, 384 bp, Homo sapiens; identical to SEQ ID NO: 3273
  misc_feature (1)..(384): n=a,t,g or c

SEQ ID NO: 4410 - DNA, 301 bp, Homo sapiens
tttttttttttttttgaacacttacatccatttatttgggaaattgcttcacctgtaaactcacaactgataaggcacattattgcaaaactgtcggggtggagggagggaggcaactctaaggatcctgaaaaggggcaaagggcacacacttgcgatgatgtggaaaacatgtttctccttccctccccctactccagaacaccaaagggccacagtcttcaaagtctgctgcctccttcccccactctcgttatcaaggcttcttttaaaggaaacacgttttaaacaatgaaatcct

SEQ ID NO: 4411 - DNA, 293 bp, Homo sapiens
  misc_feature (1)..(293): n=a,t,g or c
ttttttttgttttacaccaaccgctttttattatcgagtttcagaaacctttcacaagatggtaaaaaaaaaaaaaagaaaaaagaaaaaaaaaacaaaaccaaaaacaaaaaaactttacaaccacagctaatgtaattttttccattgttcccagtcagctccaaacccattgtgtgcaaagcccatttttttccatggcatctaaatgatnggatacagggctatggaaattctttattctatttgtnggcaggcttatgcagggtgcaggccaaacacaaggcttcggg

SEQ ID NO: 4412 - DNA, 291 bp, Homo sapiens
  misc_feature (1)..(291): n=a,t,g or c
ttttttttacatcaaaaaccatactttattttatgtatagcaatacaatttacatattaaataacactataatagaatgatttgatatagtttaaacagaagaaaaagggaaaaatttcaggttacaaaacccctccccctgaacaaatttaaaaaaaaaaaaaaagcacactttttccaaatgggtcaatgtgacgaatgttttcagtgactaattatgtctaattcctattgcacaaatgggncaatgggaattaaaaaggaaaacccaactttcacaatcactggcct

SEQ ID NO: 4413 - DNA, 340 bp, Homo sapiens; identical to SEQ ID NO: 2203

SEQ ID NO: 4414 - DNA, 434 bp, Homo sapiens
  misc_feature (1)..(434): n=a,t,g or c
gctgtatcataanntttttattagaaggcaatgtaaaagagtattgacctacacagttaggccagaggtactagccaatctccatcctccaagaaaaatgatctccagtggctcagagcccctcagtccctgtccagaggccgttcgcctgactgggactggactgaggtgggcgggggttccaggagggcataagattcctgacgggacaaatatgtgtcccagggctaaacagaactggctggaatgtttttcttacctcccatttctacttcattatgaaaatggtggactgggcagcagtgaatgggtcgatcttgtgtgtcaggttatgtaattacataaacgactgtattagctttctggggctatagtaacaagtcagcctgaactcagcatgaactaagcagctttaaaacaacagactttattct

SEQ ID NO: 4415 - DNA, 262 bp, Homo sapiens; identical to SEQ ID NO: 3279

SEQ ID NO: 4416 - DNA, 439 bp, Homo sapiens
  misc_feature (1)..(439): n=a,t,g or c
antttnggaagttaatancnctatgagtaaatttattggaaagtagactcataagcatgtaagactggccaagaaagtgaatgtcaagagaaagaaggaggagtcaatggctgagggatgcctacggtagtgaagagaaccactaggagaatcaagatctctttcatcctttctgcattcctccacagtgctacaacacactccaaggcctgtgtgggagcagttttcccagaggatggaggcaagttgattctgagtttcctattttaaaacaaaatctagggtttgactttattttctgaagtctgggagaagtcttcatcttgggtacaattgttgtgataggaggtagggtgacagtgagggactnaggggggcagctcagcttttctcttagggtgggctgcaattcttttttgcaggtgagaccaggggcaca

SEQ ID NO: 4417 - DNA, 230 bp, Homo sapiens
  misc_feature (1)..(230): n=a,t,g or c
tgtgtgtgtggctgaaaacctgttatcaatttcacatgattcagtctaacatgaaataaaacaggatgcactgaaagggcagagaaacatcagtaaacattgaaaatatggcaggaaaagtaaaanggtcgatacaaagttggaaaatacagtcaagantctccctgagaaagtgtaaganagancagggagacaggcaggangggaaagaaagaaaggaaagttgaagg

SEQ ID NO: 4418 - DNA, 384 bp, Homo sapiens
  misc_feature (1)..(384): n=a,t,g or c
ctttattaaacatcattcactgagaatttccaaagcactgtgtggttgcctagacctgtgtaccagcgctctgggggtcgggagaagtctaaggcacgggccctgcctggcgcacggctccttctccctgggaaggcagctccactggtgaaaggccactgaccaagtccagaccctgaggacgacgaaggcctcggggcagaagcctgagagantcatgccccactggcagtgggaggcggtgcaggctgggagccctgcccagggccccaggttgagctntgggggaaagctatgacccagtttgctgagagctgcaatgacgaacattgggctctntgcccagaggcccaaggaagggccatgggacttgggctgggcctt

SEQ ID NO: 4419 - DNA, 199 bp, Homo sapiens
  misc_feature (1)..(199): n=a,t,g or c
gaaaagctagtagtttatatagatagatatatagatatatagatattgatagatattgtgtttacatagtccacaagttaaatgcaggtatccataagangagcattaacaataaaaatacaatctgtgtgtngccaagtacagagacttaaaatggtaaancagcaaaaaggntctcacaaaagtacaaatatacagt

SEQ ID NO: 4420 - DNA, 295 bp, Homo sapiens
  misc_feature (1)..(295): n=a,t,g or c
gtgggtgaaaatgacagatttattcaacttaaatggtcaccgaggctacagcagaaccaatgctgttacaataggcaagcactactgtcagcagcaacataccatttatttcttcaacagcatctgagcctcatgggttatgttttcattaaaaaaaaaaaaatcttataagccagttgggaagctgttaaaggccaattttaaatggcaatgtaaaacaaatttcactgaaaatacaattcaaatacaactgctatgngcactgtaagaaaaactgactagttactcagatata

SEQ ID NO: 4421 - DNA, 319 bp, Homo sapiens; identical to SEQ ID NO: 2213

SEQ ID NO: 4422 - DNA, 259 bp, Homo sapiens
tgaaaaagtttcattgtttaaagtccacatatttgacaccttgataaggaaaatgtaaatgtgtcatataacatttattccatcaatttaaactgaagtgtctcatggagctaaacactaaaagattttaaataaaaaagcagtaacctgtatgtacacaaaatgatcattccataaatatttacatgacaagggaaaaaatggagaatcactaaaactggaaattgctacaggtgtgataatcctttctcatgacact

SEQ ID NO: 4423 - DNA, 339 bp, Homo sapiens
tctggcttcaaaactggtcctctctggtagaactgatcactctagttatttggctatattaatcttccttcacaatgcttaaagattcttgggggcaggaaactgtcacacattcatctttgtcttctcagtagtgatgtgcgtaagtttgactttgacatatttgccccaaatctgctatgactttgatttctggcacaggaaaagctgactgccctttcaacattctttttgggaatccctgatttgtgctttattagtgctcctaatcataattaaccagcatatcaatgttagtactattaaataaacataatatttgaatttactacaattatc

SEQ ID NO: 4424 - DNA, 435 bp, Homo sapiens
  misc_feature (1)..(435): n=a,t,g or c
ccagtanctnnacataagggaaattaatcagttaatttctgctgacttaggtttcctaaacagcttttagttctcaaggcacagctgtggtaaaaacagagcaaaacacccagccatttattggaattctgcagtacaaaataagcacatgtctctatataatctagtaacaggatagcaacagttaaactgtctcaaacaacagatgtatttgcttgattttccttcctaacttcttttgcatcaggaccgcaagcaaagagcttgtttcccagagtattttggggcaaatcgggaaatacataatgtgggcccattgccacaaaagggaggactggaaatcaatacggaggcaaggcccaaaaggcttcagggatttgggagccggggggtggcccatggatggaaatgccgggaggntccagggaggntagg

SEQ ID NO: 4425 - DNA, 375 bp, Homo sapiens
  misc_feature (1)..(375): n=a,t,g or c
tttttattggatttaaatattttatttaaagaaatattcttaaggctgcagtttattgataagaaaaatataaagcatacatgtttatagattatgtattgacattatagtatatagattctccaaataacataattaattttgtagtgctactagtggaatgcattctgcagaaacatggctttaccttcaaatctaagcacaatacccttacatcaaaaatgaaggataataaaagcacaactttgactcatttaaattttgggaggccacatctggatttgttggagggggtaaattcggtttatttccctcttcaggggaggncattattttttgccatctctttcnggggcccccttttatccctnttaa

SEQ ID NO: 4426 - DNA, 523 bp, Homo sapiens; identical to SEQ ID NO: 3288
  misc_feature (1)..(523): n=a,t,g or c

SEQ ID NO: 4427 - DNA, 298 bp, Homo sapiens; identical to SEQ ID NO: 1786
  misc_feature (1)..(298): n=a,t,g or c

SEQ ID NO: 4428 - DNA, 495 bp, Homo sapiens; identical to SEQ ID NO: 1792
  misc_feature (1)..(495): n=a,t,g or c

SEQ ID NO: 4429 - DNA, 477 bp, Homo sapiens; identical to SEQ ID NO: 3898
  misc_feature (1)..(477): n=a,t,g or c

SEQ ID NO: 4430 - DNA, 308 bp, Homo sapiens; identical to SEQ ID NO: 3439
  misc_feature (1)..(308): n=a,t,g or c

SEQ ID NO: 4431 - DNA, 238 bp, Homo sapiens
  misc_feature (1)..(238): n=a,t,g or c
actttatttcaaaaaatataaagcacatatgacaaaacattaacacatgttatttctgggcggatggtacttatattttatacttttctgtatttaaatttttcaaaataaaataatgatcctatatacttttaatacaaaatcacatatgtagggcatcactttatacgcagggaatctttacaaaatgaactatgtgctatcacaacaaactccttaggnacaatagtttntaaca

SEQ ID NO: 4432 - DNA, 397 bp, Homo sapiens; identical to SEQ ID NO: 2226
  misc_feature (1)..(397): n=a,t,g or c

SEQ ID NO: 4433 - DNA, 445 bp, Homo sapiens
tttttttgaattgttcagtgcatccaacactttacttactccacacctttctgcaaaatgctcataataaacctcctgtctacattgtgttccaatgaaaactttagtcatattttacatttattattaatataacatgctatgtaaatgtacaggagcctgacaaatgacaatctacttacataatttaaataacacaagtgcttgctgcagtctttattagtacacagctttgttatggcttcttagaaataattttaaaaagtgcatgattcttgtgggctactctgtttaggaaagattacagataacacatttctaagaatgaattagtcagctgtatatgggttcagattagaaaatattaaataaatacagggaaaaatatttttaattagcttaatttatatatgaaaatattttatttaatttgtttttgagacag

SEQ ID NO: 4434 - DNA, 436 bp, Homo sapiens
cagtagaaactgtacttcaaatattgaatttttattcaaaattctttataactttattacaatatagattttgtgttggatagttttgcccactgtaggctaatgtaagtgttctgagcatgtttaaggcaggctaggctaagctatgatgtttggtaggttaggtatattaaatacatttttgacttatgatcatattttcaacttatgatcatattttcaacttatgatcgggtttatcaggatgcaaacccatcacataaatggaggggtgtctataaaacattgttagacctataattttgctgttgattattcgggaggtggtatggcacagtggttaggggcagaggccttggagttggactacatgggttcaaatcccagcttggctgttttctgtgcagttctaatccagttctgccacaacctggtt

SEQ ID NO: 4435 - DNA, 406 bp, Homo sapiens; identical to SEQ ID NO: 3303

SEQ ID NO: 4436 - DNA, 349 bp, Homo sapiens
tggttccatcggtgattttaagaatttcatttaggctacagaggttcataggaggactcagagttccaggccctccaaggagactctggcctgtaactgatttaatcccagggcagtaaggtgagcagcatgtaaccccttgtcaaataaggcagtggaataagggttgacagaggccagcactcaggctgtgctgctcaatgacagtgaactcttccaggcacagatgatgagggtctgttgctctcagacttggaacatgagaacagcaactgtctcttgtccattaagaaaaaaaaagccaaatttcttctctgggcaatatccaagcccaaggtgtaagaagaaa

SEQ ID NO: 4437 - DNA, 359 bp, Homo sapiens
ttttttttttttttttaaaaatcagatggggactttattgtgatggtggcaggtccaccagcagatgcaaatgtggggtgctgagagtggcaacacaggccaccccaaaccaacttcactccctcccctgtcctcagccagtacagaagccaaatgtagccccagccctagactccagcccaggcagagtccaagggaggggtgtcagggtcagaagtcacagggagcccagtgactatcaaggtggctgagagcaaggctagggtagggatggggcagagaaagggcagggggtgcagcccaggtggcccaaagcaacacagaggagcaagggctggcattcaagtcagcaggtccct

SEQ ID NO: 4438 - DNA, 432 bp, Homo sapiens; identical to SEQ ID NO: 807

SEQ ID NO: 4439 - DNA, 315 bp, Homo sapiens
gaaaagacgtgcttgtcattcttaataaacaactagagtaagaatacataagagaaacagagtggtatctttatatgatacacaagtgtatgttacaagaattccatcaggcacaggagcctcaggttttaaggcctcaatgttaggccaacaaaaaaaaaaaaggcatggtaaagtttttacttttacatctaaaatgtcacttgtcataaaggagggtgtaatagaaattgtctttaataaatcataattgaagttcccctcatttttcttccattaagatgctaagtttatgtctgatcatgaagaaagaaa

SEQ ID NO: 4440 - DNA, 408 bp, Homo sapiens; identical to SEQ ID NO: 3901
  misc_feature (1)..(408): n=a,t,g or c

SEQ ID NO: 4441 - DNA, 454 bp, Homo sapiens; identical to SEQ ID NO: 3308
  misc_feature (1)..(454): n=a,t,g or c

SEQ ID NO: 4442 - DNA, 248 bp, Homo sapiens
  misc_feature (1)..(248): n=a,t,g or c
aaacgttaaacatcgtttttattcccagcacctaccattgtgccccccttataatagacagtaatggtatagtgaatgaatgaacaaatgaatgagttgagaaatccagaataatacatcacaagctacagcgaatttntcttgctagtgctcaggacaggtgaaatgaatcataacaggttggtgtctgtgaaaagctgacagagatgtgagaggtcccaccctgaggccaacaaagactctgcagc

SEQ ID NO: 4443 - DNA, 272 bp, Homo sapiens
aatttctctcatctttatttttattaaaaaaaataaaacagtcaccaccaaccacatgacaactcgccaggcaaggccttgcttccctccctcctttgcgtcccatgtgcctagtcagcaaggtcggggaggcaccgatgttagcttcgcccaaagggagtattacagagagaggcttgggaaagggaaggaaacctggacaggcttttcagcactgagaaatcacttaaaactgatttgctttcagtaactggtatgtctgaaatgcaggg

SEQ ID NO: 4444 - DNA, 247 bp, Homo sapiens; identical to SEQ ID NO: 3315
  misc_feature (1)..(247): n=a,t,g or c

SEQ ID NO: 4445 - DNA, 268 bp, Homo sapiens; identical to SEQ ID NO: 833

SEQ ID NO: 4446 - DNA, 290 bp, Homo sapiens
ccggggtgagacgggtttattgtgcacatttacacagcgtcacagcgtctgggctggcagcggccatgctcctgtggtcgggctgctctacaagggcgttcacttttcttcaccacactatgtacagtcagtgctccaaggtgatgggctacagtgctgcatcagtgagtctgtacacacatttttacataaattacacacgactcatacatgaaaaatagagcctaagggcctgtattttaatgagaaaaaaaaaatttccaacatagttcgggtagctttgaatggtc

SEQ ID NO: 4447 - DNA, 291 bp, Homo sapiens
  misc_feature (1)..(291): n=a,t,g or c
gggatgaatccccaaagtttatttaatctggtaccctcattaattggaagaatgtgaggctcaaaaatgaaatggccacaagagccatgactagaatctcttcgttactcagtccagtgctctatcataccagctactttcactcttctaacccacagtttaccgtatttnctaatacatgctagtatattgcctagtacacaacatcctttcaaatattctttctttattctccaattcacttttcaggagaatagataacctcaatcatattgattctcagcctaatgg

SEQ ID NO: 4448 - DNA, 347 bp, Homo sapiens
  misc_feature (1)..(347): n=a,t,g or c
gctttccagcttttatgaaaattaataacattaatagctcacagacatatacatacacacacattgctatgtacacagtcattaagttattaattaggctctgtaaaaaaaaggtttctacattagtgttccgggctaggcccantcagtccttggcatattcacagtggcagccccagggcttggccccacaggcaggcagaggggaggcaggaggccacagagcagccggccccacagtgagcacagcaagtgtcctgggccacctccttgagtcttcagttcccttcctagcacctgcagtccagctgctcagcaagccggcagacaggtcctgatcccttctg

SEQ ID NO: 4449 - DNA, 365 bp, Homo sapiens; identical to SEQ ID NO: 3316
  misc_feature (1)..(365): n=a,t,g or c

SEQ ID NO: 4450 - DNA, 322 bp, Homo sapiens; identical to SEQ ID NO: 3905

SEQ ID NO: 4451 - DNA, 273 bp, Homo sapiens
  misc_feature (1)..(273): n=a,t,g or c
acatgaacaacataagtatttatttgaaaaacattttccatttaagtaaaatggcaaattagctagagtagcttcttactgctaattctatttgcactcacagtcacttttattcatcatattcaaagatattgctaccaaaaatgatttcacaaagtatttagaaaaaatatatacagtctctctaatagaaagttaattaaaacaacaaagctaggcaatatcaagctaagaaaggnaaccaattgacatatataaccacaaataaataaa

SEQ ID NO: 4452 - DNA, 287 bp, Homo sapiens; identical to SEQ ID NO: 328

SEQ ID NO: 4453 - DNA, 321 bp, Homo sapiens; identical to SEQ ID NO: 3906
  misc_feature (1)..(321): n=a,t,g or c

SEQ ID NO: 4454 - DNA, 193 bp, Homo sapiens
aaacaccacacatacacaaagcattttaaaggagccacatatatctatatagcaactctgactgcttttcaaagttaccagggaaaggaacttattcaggctttctttaaaaaaactccttagttttaatgtatatctttttaagattgatgctgtcatttgaagtaaaataatgtcatatggataatggggg

SEQ ID NO: 4455 - DNA, 397 bp, Homo sapiens; identical to SEQ ID NO: 3120
  misc_feature (1)..(397): n=a,t,g or c

SEQ ID NO: 4456 - DNA, 369 bp, Homo sapiens
  misc_feature (1)..(369): n=a,t,g or c
gaagaattttctctttattgagtgctcagtgtggtctgatgtctctgttcttatttctctggaattctttgtgaatactgtggtgatttgtagtgaagaaggaatattgcttcccccattcaggacttgataacaaggtaagcaagccaggccaaggccaggaggacccaggtgatagtggtggagtggagcaggtgccttgcaggaggcccagtgaggaggtgcaaggagctgacagagggcgcactgctgctctantgtggctggggccttggctaagtgtccccctttccacaggctcgctccaganccagggcgnggcttgagagagcagagtggtccaggttagcccttgccttggggtgctgg

SEQ ID NO: 4457 - DNA, 456 bp, Homo sapiens
  misc_feature (1)..(456): n=a,t,g or c
tcaaagaaaggatgcctgtagttagggaaatctgaagagtttttaaatgaaaaacctgctaatctgggttagagataatctgtgactttcaggtaagaagaacattcagagaacatagggcttctaatagaagaaggataaaccagaagataggtaacaaagccaaagaaataacttgacaagaaagctgaactttggccagaatataaaacatgggagttattagtgatatgaggtagaaaggcggtgggtgacagtaaaagaatcatccataccatttccaagttgttggccagatggaaaaatttgtccctaataacaaaccacttcagtagaattctgtaatggacaaagttagaaaaagccaaatatgttgcaattataacagattatgataattatggaaacagaaagcnaagttactagggctaaggtattaaaatgagtagaagaaaa

SEQ ID NO: 4458 - DNA, 471 bp, Homo sapiens; identical to SEQ ID NO: 3908

SEQ ID NO: 4459 - DNA, 317 bp, Homo sapiens
aaaaaatatatgcgtatcacaatttattaaactctaacatctaagagcaaaaacaccaggattaagtaagaacatgcatgaactaaaatttacatagatattcaaagtaagttaaatttaccagagtcctgcatctggcctctcccatgccattatcgctattttcgcaatttgttttgttcaggaagcctctgattttaatatttaaagtgtcacctgagaagagtaacctcaattcttcatgttttctcaacaatcttagaggtgttggacatcattaataaaatatactaaattatcagagaacttaagaacgc

SEQ ID NO: 4460 - DNA, 463 bp, Homo sapiens
  misc_feature (1)..(463): n=a,t,g or c
ttttttttttttcaacaaaactgcagtttaatttcagaaaatgttaaaatatatatttatacatcaatttctgacatacacttaatgtgttagtatacacaaaatgatgctttcttttgaaactgtatttangaaatgtacattttaatttaaatactcagtatacactgcacttaatctgcatgttgcatttattaaatacattaaaatctgcaatgtaacaaaacgttttctgcatacgaaattcaaaacaccattttaaatgaacaaaagatggctcacttttttttttttttttttacaactagngtatngtacactagctcagctccaccaaactacctgntcgttcncctttatttgacattggttcacagacnagtacatattacnataagagtgcnggataaaaacctgnggtacgaaagtgggttcccaggnttttagggncctggcaggatca

SEQ ID NO: 4461 - DNA, 466 bp, Homo sapiens; identical to SEQ ID NO: 3128
  misc_feature (1)..(466): n=a,t,g or c

SEQ ID NO: 4462 - DNA, 252 bp, Homo sapiens; identical to SEQ ID NO: 3909

SEQ ID NO: 4463 - DNA, 323 bp, Homo sapiens; identical to SEQ ID NO: 1820
  misc_feature (1)..(323): n=a,t,g or c

SEQ ID NO: 4464 - DNA, 427 bp, Homo sapiens
tttttttttttgagctggagttttgctcttgttgccaggctcctgagcagctgggactacaggcatgcaccaccatgcctggctaactttgtatttccagtagggtttctccatgttggtcaggctgatcccgaactcccgacctcaggtgatccgcctgcctcagcctctgggattataggcgtgcacttgcgcccagcctccagttttcttttctttagagcagcggttttaaatccttttggcttcaagttctctgaaaatttactatgctctccacaacaagagctcccattttccacagacacagtcaatgtcagtcagcttgtattcaggaggacagggcagagggatcccagtggcacttcccatgggaagacagaagagagtgggccccagagatggaaggaccccagtgtcatcacca

SEQ ID NO: 4465 - DNA, 422 bp, Homo sapiens
taacaaaatggcccctaaacaaacaccaacaacttcacttggtcttcaaacaaagaaacagtctttttttccaacataggaggaaaagctacttgttgtggatgtacaggtttccaacatggcacccttctaaagggctttcaaggatcatcctaatagcccattttacctatgtactgaccttggaagctaacccctgagtatgatgcaactccactctaatgtaaattaaaatgccatgatcttaaaaatgccataatattgtcagtataatttaatttccagtttagttccatcttcacatttagcagtgtgtgtctgtggccgtctcctggtgccagcatttcagaatgtactatcactggctgagaaaatctcacggtgagaagagtagtgtgtcataagatctgaacaaaaaagct

SEQ ID NO: 4466 - DNA, 330 bp, Homo sapiens; identical to SEQ ID NO: 1824

SEQ ID NO: 4467 - DNA, 420 bp, Homo sapiens; identical to SEQ ID NO: 3136
  misc_feature (1)..(420): n=a,t,g or c

SEQ ID NO: 4468 - DNA, 411 bp, Homo sapiens
  misc_feature (1)..(411): n=a,t,g or c
atttaatttatttatgtaatacagtgtagaaagctatcatggcataagcaatgattctgtacaatcatcctgcagaaaattaatttttggagaattcttggtaattggagaccagcagaacactccctccccccaccccgtaaaagtgcttatgatgaacagggataattttnttttaatttttttttatcaaagatccaaagatacatggacaaaaaaaatgttcaaattctcaatgcctaatgtgtgcacataaaacaggcacaaagaaatcaatgtgtatcctcttattcctatatcacaaagagagcagaagcagcaatctgtacagtaagatgcagtcatggaaaaagaattttctaagtcatttggaatacttaaaaaaatgttcaaaatggcatagtgatcagg

SEQ ID NO: 4469 - DNA, 780 bp, Homo sapiens
  misc_feature (1)..(780): n=a,t,g or c
tttttttttagctttgacacatttttattaggtgcatgaaaactaaatgtcttattgccaagtatcatttttacattttctcgtcaaatttttataaaagcttaagagcaaaatgcagtaggatcttaaaaaaattctacaaacatagctggataaattctgctgctgagccagaactgttggctggaaggcagcgcaccatgcgatcgttccaaaggctgtcagttttgtctaaagacacaagctgggatcctctaagagttgggcaactaatagcaaaagcccacttcctgtcataggaaggttattttcaaactccaaaccccagcaccacttctgtctctgaaanggagagggagagaaggaggagctgtttacaaacaggatgtctgattacggagttacaccggtggccagattggatcagatatttaatgcttgattagggtggctagtgggcaggttaaggctggcagattctgagtactctccatttaaggacgcctgcaccnggatacaacttgccgacttcataacccagctctgtggctggctagcctacgnctttaacaagggacaagttcgggccaaggctcagttggtggattggaaaataatgtctatangaccccattatacctaaagtttctaagccataaagtctgtgactgtgtgcatggtgtagacatnggctaaacccagaanaggggttagaaaagtcntcctaatccttaatttaaggttattaganttggnggttcccttccaggttttggcctc

SEQ ID NO: 4470 - DNA, 422 bp, Homo sapiens; identical to SEQ ID NO: 3137

SEQ ID NO: 4471 - DNA, 572 bp, Homo sapiens; identical to SEQ ID NO: 16

SEQ ID NO: 4472 - DNA, 403 bp, Homo sapiens; identical to SEQ ID NO: 3139
  misc_feature (1)..(403): n=a,t,g or c

SEQ ID NO: 4473 - DNA, 374 bp, Homo sapiens; identical to SEQ ID NO: 561
  misc_feature (1)..(374): n=a,t,g or c

SEQ ID NO: 4474 - DNA, 447 bp, Homo sapiens; identical to SEQ ID NO: 2269

SEQ ID NO: 4475 - DNA, 302 bp, Homo sapiens
gttttttaaacatagttgctgtaaacgtctatgggaaatacagtctttataataggttctgatagaataattgagtaattcccccccataagtacattttattgactgttactgcataataggcgataaatctgatgcttatttggaaaagaagtaggcattctttagatgagctgtgctttgaagactgttatgaaaaggaataagaagtcagcatagtggcactcctggtttccttttttggcccccgcacagaaaagatggatgtagtaaagaaagttggagtgaaagagaaagttcca

SEQ ID NO: 4476 - DNA, 419 bp, Homo sapiens; identical to SEQ ID NO: 3144

SEQ ID NO: 4477 - DNA, 411 bp, Homo sapiens
tttttttttttgagatcgagttttgctctgttgcccagtgcagtggcatgatctcggctcactgcaacctccacctcccaggttcaagcgattctcctgcttcagcctcccaagtagctggaactacgggtgcgtgctaccacacccagctaattttttatgtagagacggggtttcaccgtgttagccaggatggtctcgatctcctgacctcgtgatccgcctgcctcggccttccaaagtgctgggattacaggcgtgacacccgtgcccggcctcaactttttatttattagcttgttggtcttcaacctctgtaagcctcagtttcctcacttatcaatcatctactgctgtatagagacaggtccatctcctagcatgcagggtgaggctaatgtgacatttgaa

SEQ ID NO: 4478 - DNA, 638 bp, Homo sapiens
  misc_feature (1)..(638): n=a,t,g or c
tgttgcatccgtgtgagctccataaatctgctatggaacagaactactggttcttgaatggaatcagttgtgctgtttgctccctcagatgtctgcttcccatagatcctaccagaaatgaagtcagaatcttcctcttttctctctagatgctgcaatcgcttggaatcttgttcaaagattgagctgtgtaaaaaacgagaagcaaacaattcctgcctctcttgctcttcttctttatggtcctctttcttatcatccattttcccttctgaatcagtcctaattttcttctttttcatgtaccaggatggaataggtcttggagcagagtcaaccttttctttatctttgttgtttcgaaaatttgcaaatcgggagtcccaatcaagaaaagaccaattttcttcacgagatgaagagagggatttagctctttcaagcaaagcttagtgtctggtgtgattgtctatccaatgcaaaagagtaaaatttgttccttctaaagaactagagagtctttcatctcgctcacgtagctgtcttctctgtccctcaataaaaaagacnatcgagaaacttcatataatggcagagggctcgggtgagtggganttgtgttcaccatcctcgtcaga

SEQ ID NO: 4479 - DNA, 354 bp, Homo sapiens; identical to SEQ ID NO: 2274

SEQ ID NO: 4480 - DNA, 387 bp, Homo sapiens
gactaaaatgaatatattattctaggttaatttttttccattcaaatgtttatactccatctacccagaacaattacagcagaaaaaataggcacctccaaagtcttcccaagaatgatgactttctgaaatgacacactgtacaaactggacaaatgagacgactgactgtgacaggggccggggagctcttcaaggggccgttttcttcaagtctcggatctgtttaatcaagtagttcttctcgtcagcgaactgctcatcatccgtcctttctttttggaagctgctcagaaactcaatgagtttgggctgattttttaacaggatctccacaataggctgtgttttgtgaggactggccacaaacaccttaaaaacatgaaa

SEQ ID NO: 4481 - DNA, 317 bp, Homo sapiens
ggaaggaaggaagggtttatttgatgcagattcttcagcattttgttttcacagactcccttcttttcccctcttctggacccacctttttgccatctcaccgttgatgagcagcttcagcttagagggtaaagacaggcatgatcgcgactggccagcatactggcgtgttctctctgttagcagacttttgccaagggtttggatggaatgggtggctcttcaggtggaaaacaggtcgtgggggtcaggttttgggtgcctgaaactgctcttccttcactccactgtgccatgactggctcccacccgaagct

SEQ ID NO: 4482 - DNA, 330 bp, Homo sapiens; identical to SEQ ID NO: 3155

SEQ ID NO: 4483 - DNA, 305 bp, Homo sapiens; identical to SEQ ID NO: 2929

SEQ ID NO: 4484 - DNA, 408 bp, Homo sapiens; identical to SEQ ID NO: 2283

SEQ ID NO: 4485 - DNA, 501 bp, Homo sapiens
gaaagaaaaaaatatattatcatttattatataacaatgtcaacattaacaccaagacagggacagactccaactacgcactagggaaaaacactcaatgaggcaagactttctagagcccaaaagaaggaatgggggaagagatctggggagtagcgtgaatgtggctggttgatgggtgtggtggtagtggggggtgggactcatctttttgtgtttgtttttttaagttttgagacaaaacaagaaagtcacatttttaaaattgtggtttcaagctactgattagatcagcatccagcgaccttgagtgcagatgtgaacattgggtgaaatgaaaaatcttgtctgtggggttctcttggctactgtctctctccttctctctctttctcctctctctctctctttctctaggaaatgtctgttgtgaagcaggcctcactttagctattgtcgctccactctggcaccatgccactccgtgcacagaggggtact

SEQ ID NO: 4486 - DNA, 358 bp, Homo sapiens
tttatgaatcctgaaaatttattatttgggagaatatccaatattgattctttgttttacagctcataatgatcagaaaatatacatttaaaatgaaagtcaaagaaaaggataattacatataatacatattacagatttatttgtacataagcaaagcagtactaaaagcatatttatgtgctcacaattagtgaacatggcaattttctgtttaaagctgcagcaactcaaatcctcctagggtcaataaagaaaaacatattgagaaatacatttagggctatcaccatgtctggctgtaaatctattttttaatctttcccctccccccatatatatgtatatactttattgc

SEQ ID NO: 4487 - DNA, 267 bp, Homo sapiens
ttttttaaagggaaatcattcatttattaaggatcgcaagacaacatcttaatttctgtagtacgatttaaatgttttacttctttgataaagcagagtacaatagaaaaaaaacaattagtttccagtaatatctatatctctaatcagaattaagtcttccaagacatattacctggaaataaaagcctgttacaataagcaaagcttcaaccagagcggctacttttcgtgccaggaaaaagttcatccctatagggaggaatg

SEQ ID NO: 4488 - DNA, 414 bp, Homo sapiens
gcctttttccacaggttctaatccagcaccattattaagactattcttcttccattgaattactttggtgatgctacttgtgctgaatccataaatctcagatcaaaatagccactttcaataagatccaggtgatacataatctgatcaaacaactcttgccctttggctttttttggcaagtccacactaacatcagtaccatccagaagggacacctgacacgtgatgatggacctggaatctccaggggcaggaatatgtgtggcagcgcattgtgcttctcggagtcgttccttctctgcatgtttacccatagaccgactccctagtgttctacggaagaaactcagcatttttgtcactgagctggggacggcatgtccccggtgatagcgaccagagagatgaaga

SEQ ID NO: 4489 - DNA, 396 bp, Homo sapiens; identical to SEQ ID NO: 2287

SEQ ID NO: 4490 - DNA, 412 bp, Homo sapiens; identical to SEQ ID NO: 1857

SEQ ID NO: 4491 - DNA, 376 bp, Homo sapiens; identical to SEQ ID NO: 3922

SEQ ID NO: 4492 - DNA, 460 bp, Homo sapiens
ttttgacactgaactttatatttaataattacagtaagaattttttggtagattttattcacacacattttaaaaatcatgaacaaagtcattaattctgaactcaagtaacagtcaaaaatattttaatttaaattaaggcactacatacacatttctttaaagcacactgatgttattttatttacacactattttaagaattaacaataaatacacattttccatctcctccttgtccttcatttataactttatatgttaacaaggaagtaaaaccctccaaataaaaggaattaaatgcaataatccataaagcttatcagatatgggcacaagaaggagacacccataaacaatgtaaaaacattttaatcctttaatgttacaagaatttatctataaattcttatgccattcctagtggaataataatataaaacctatacacaaacattga

SEQ ID NO: 4493 - DNA, 452 bp, Homo sapiens; identical to SEQ ID NO: 2293

SEQ ID NO: 4494 - DNA, 283 bp, Homo sapiens
tttacgatttaaaattttaattgttaccaaacaaaaatatccactcaaaatacaattcaacaatgcaacagtcatcttacagcagagaaatgcagagaaaagcaaaactgcaagtgactgtgaataaagggtgaatgtagtctcaaatcctcaaagagttgtgtttatttcatcgacaaatagattattcgtattcaattctgatgtgttttaaagactaagatgctcattttacgattagcgcacatgtgtatattgtcacctgttctccttagaaaaatgc

SEQ ID NO: 4495 - DNA, 181 bp, Homo sapiens
tttttgtggattagattttaatgtgaattttggaagtacacaaaatgttcaaactatagcatgtatatatatcaagttggcagtataaactacttgcaagtaactttagaacacaagtgtttgcccattggtagtgagatggattctaagttgagatattagctagaacattccagttggt

SEQ ID NO: 4496 - DNA, 514 bp, Homo sapiens; identical to SEQ ID NO: 1862

SEQ ID NO: 4497 - DNA, 449 bp, Homo sapiens
tgttaaatgtcatagtgtttactttatttaaatcctgaggttaaaaataaagtatttccacatggcatggcagacactataaaataatatgcttagggatacaaaagttttccacccccattgagcaggtggggtgctggtatttgatgtgcttctagataattctttggcagataagaatgaattggggtcccagacccaccatcccgtaaggccacatgaattgaggattaatcaattaaagtgcaattccaaatgttgagccttccaaatgaggcttgggtattgctctgcagccaccagaggcagagtgtctctgcataacatacatcaagcagcctttttctttttttaaatcagagatgcctccccaaatttcaagatgtactttattattttaaaagtgcttaagaggaaagagagaattattaattcagtctctcctgttt

SEQ ID NO: 4498 - DNA, 384 bp, Homo sapiens
tttttttttttttagaaaaaggcatttaattacaaaattttcttttaaataaaaaagcaatggcacgaatcaccacaaaatcatttaagtgatcatatccacaggctgttcttgtaattatatgctaaaaatttatgactgttctcattaacagcattcccccccttcattagagacatcaagagcttctgagaatgtgtagtttttcctaaagtactactaaaagtatcatgaacaccgtttgtgcagcattcatttacatcaccttttatttactatattctaaactcataaaatatttaacatttctctacttcatttcttatttacagtacagaggctcatctcttgtcacaatatggtttgtgcattaaaatccctggg

SEQ ID NO: 4499 - DNA, 158 bp, Homo sapiens
cggttgattttggggggtggagtttcagtgagaataaacgtgtctgcctttgtgtgtgtgtatatatacagagaaatgtacatatgtgtgaaccaaattgtacgagaaagtatctatttttggctaaataaatgagctgctgccactttgactataaa

SEQ ID NO: 4500 - DNA, 281 bp, Homo sapiens
  misc_feature (1)..(281): n=a,t,g or c
gatcgcgccactgcactncagcctgagtgacagagtgagaatccatctcaaaaaaagacaaaaaacaaaattgcttgctaaagaagtggtctcctgaggtcttaagacattcctgacagtntcttgagtgggtggnagagaggttgctgtcattgcnctgtggaatttcacagatgagaccacgcctagccaaaatcacttttcctgtttgcctcagtgacacagttcagggccctcgtggatgttgtattaaataaattnnacctntactntttgccaaa

SEQ ID NO: 4501 - DNA, 315 bp, Homo sapiens
cagtttcaaaacaacctttattctgtttgaagatctaatacaatgcattaaagcaacttaaaacaagacatagctccattgaatctataacttgaacgaaatgtcaaggaggcacactacccccaccccccaccccagttgccttgtgaaggcaaagttacaactgaccgtgacatcctccctctcgtcaaaagaccaactttattttaacaatgtcatataaacagatttttaaaaacattgaacagattgtagctttaaaaatacacaggtataaatgagtttttttttgttttgatttttttaaatacatat

SEQ ID NO: 4502 - DNA, 223 bp, Homo sapiens; identical to SEQ ID NO: 1869

SEQ ID NO: 4503 - DNA, 317 bp, Homo sapiens; identical to SEQ ID NO: 3227

SEQ ID NO: 4504 - DNA, 175 bp, Homo sapiens
aatacaatacaggtttattgcatcatttagctaattcccaaagaagagaataacacattttaaaccataagcctgtttgaccatgctaaaaccttttttgagctattcaggatcattacaaccccatattcttttgtgtatactgtgcaaatgcaaaaaaaaaaaaaaaaaccaa

SEQ ID NO: 4505 - DNA, 383 bp, Homo sapiens
  misc_feature (1)..(383): n=a,t,g or c
agatgantttaaggttttattgagtggtggagctggctcttggtgagatggatggggagctggaagggggatggagtgggaaaatganctttctccgcagtgtggccgtctagcagctaatctcctctctgaccatccccaaccaaagtcttgtcaatgttcagtcactccttctctnctctttgccactccattcttctgtncttctgctcttctctttgtctctcccttatttgcaggaggtcacagggaagtagagagggggatgaagaaatacatttccatcctgaggtggtctgccatctcacttgaagaggggctacaggaataaggaagtgttctttttctcgttgtaatncaaggggcaatattccgggttaagg

SEQ ID NO: 4506 - DNA, 383 bp, Homo sapiens; identical to SEQ ID NO: 4505
  misc_feature (1)..(383): n=a,t,g or c

SEQ ID NO: 4507 - DNA, 208 bp, Homo sapiens
  misc_feature (1)..(208): n=a,t,g or c
ccatccttctcaaagagacaccagtcagaaatatagatatgcttatgcttgcttggtgtccttgattataaatagtccaaacatcaggaaactaaaatcaaggtgattatataactcctaaagatggaagttgtcaaaatacatcatcacaaaacaaattttaaanggctattttaaatacangattccatcttcactaaactgcccc

SEQ ID NO: 4508 - DNA, 287 bp, Homo sapiens
atgcatgtttaaacatttaatctagaacttgattacaaagtaatttaatgaagaaaataatctgttataattcttatagatgtttattagtttttagatttaaaaaaaaaacagggcttataattaaagcaattgactaatgatctcacagcctcaaggttgtatgcaaacctagattagaaatactttggtctctaaaaataacaaaatggaccataacattttttttcttacaagtttgaagtgggtcaattatgggggaaacacatacattcctaaggggaaat

SEQ ID NO: 4509 - DNA, 574 bp, Homo sapiens
  misc_feature (1)..(574): n=a,t,g or c
ctagagaaaactttattgatggttgaaaacaaaataaaatacacataaggttcccttcccatctctaatatggaaaataaaacacttaatatgaatactcagttttaaactttgctctaagttttattttattttattttgagatggagtcttgctattgcccaagctggagtgcagtggcgagatcttggctcactgcaacctccgcctcccaggttcaagcgattctcctgtctcagcctcccgagtacctgggactacaggcacctgccaccatgcagggctaatttttgtatttttagtagagatggggcttcaccatattggtaaggctggtctcgaacttctggacctcaggtgatcttacctccctcagcctcccaaagtgctgggattacaggcatgagccaccacccccggcaacttttttaatttatattttattttttattgaaataggtgggccaaaacttggtggaaacagaactcatgctgaaggacgacattaatcataataatttaaagagacagatattgcttatgtaacccgtatnaagaatttaaaaccaatcca

SEQ ID NO: 4510 - DNA, 486 bp, Homo sapiens
  misc_feature (1)..(486): n=a,t,g or c
accctgagatagaatagatttattagcaagaggtaatcaggaaacatatatttttacaaaaatggaaatttttttccaaacaagctgtaagttgaaatattttaggacttgaaatagaattctcataccactaggtattgcttacagcaaaagttgtctgtctgttgtagtggagcatgcctgccacttcggagttaacctgtgttttctatactgtacagtgtaaaaaatacatggtaatattcacagaataagcactacattactatattcctgctagaaggcatttagacaggactacagtatatgccataaaaacacttggttattggattttccctaattcctacagtgtgggtactaaattatccaccaaggtatacnggacttaagagccatcctcaatggtaaggcctggtaagtgacccgttangcagccttaaaganggaaaaagtgacatttttggggttccccgactttcagtg

SEQ ID NO: 4511 - DNA, 282 bp, Homo sapiens; identical to SEQ ID NO: 1369
  misc_feature (1)..(282): n=a,t,g or c

SEQ ID NO: 4512 - DNA, 395 bp, Homo sapiens
  misc_feature (1)..(395): n=a,t,g or c
tcaaatgttaatattttcactttattattacatctaccaagcttagtggaaggacagggctaggggaaatagaggttaaacctcaataagaaatagtattttaagccaggtgtggtggcacatgcctgtaatcccaggtacttaggaggctgaggcaggaggatctcttgagctctggagtttgagaccagcctgggcaacatagtgagaccttgtctcaaaaaaagaaaagnaaagaaaagaaatattaatagtattttagttgggcagtgaaaatgggagaatatcaatagacatttgaaaaagagggaagagcttcagcaaaggccaggggagagaaaagccagtggtgaatattaggggctggcatacaactctaattgtgggagggaaga

SEQ ID NO: 4513 - DNA, 472 bp, Homo sapiens
  misc_feature (1)..(472): n=a,t,g or c
tttttttttttttttttttcagttgaaacatacaactttattgatgatacacaaatgaagtctttggtggataaattcaagtcaaaacaaataatagaacagtaggccattcataatggacaggtttactgtcaattcagaagaaccagtaaaaatatttctatccaagcagcacgattaaagtcacaaatatgttttcagtacaagaggtctatttatttggtattcataaaatggttcagcttaaagctggtgactgtcacagataacatcactctggatgatacattattcaacactggcagctgaaaggatccctttactatatgagcaagtggaaaagcagtaactttcaattttcaacgcttccacactgcaaaatcatgaaatttcttcaagtcttttgacggtacataaccaatcagaatttggttcactagttttataactttcactttcactaagagggcnt

SEQ ID NO: 4514 - DNA, 337 bp, Homo sapiens
ataattcatgacaggtttaatcaggtaattccaggagggaaaaaaaccattaaaacaaattcttatgataatcatctgctatgtccaattacacgggtatgaagtaacagaaatggttacaaacttattatgtattatttacattatatactcaaaactatcaagctagttaactatatctgaggagacacattatgacatgagttaaacagtttttcattgttcattagaaagaatgcagtcaagcttttaatggaaataatatacaagtgaggcacttttgaggtcagaaatagaaagcaaacgacactacacactggaaatgttcacaaaaatc

SEQ ID NO: 4515 - DNA, 510 bp, Homo sapiens; identical to SEQ ID NO: 3928
  misc_feature (1)..(510): n=a,t,g or c

SEQ ID NO: 4516 - DNA, 503 bp, Homo sapiens
  misc_feature (1)..(503): n=a,t,g or c
tttttgcctcatcaaaatttattaagttgtacatatacagtatattatcagaacaacaccaaagtggctacacttgacagattctcctaaagtggacataattttcctagagattattattccccttgataaaagttgtaatgattgtgaaagctttgaaagacaagcttgaagggccacagcattgactatcagggcaaggagctatagatgccatgcacgcagggcccagaaggcagcagagccgcaggaggctgtggcagccccgtttctgctgtgagcaaacagtgctatgaggagaccaacacaaagaggaaggtgcttcctctccaggggtagggtctttgggttcacattcagaaacacaagacaccacacccaagagaagaaaggaaaacaaantccctacagggtctgggctncctccaagagacggggccagtgtgccaaaagagggcacgagttgagatgtggaagtttctggtgaggnacccattccttca

SEQ ID NO: 4517 - DNA, 347 bp, Homo sapiens
  misc_feature (1)..(347): n=a,t,g or c
ttttttgttgacacaaaatctttttattccccantttgccatcttttccacaaacctctcanggtacaaatcnggangaangtgcatataaaccctgccttatttaaccaggcccaccgcctccgggacagcccctggggaggccccatcccgctaagtatgaagggaaggccacaccaaagtgctgagtgagccacccagacagcaggtgntntgggagggaggggcaacaaggggtaggggaaggnttcctggaggagggagaggctggccctgagagacagggggcggtcctgaaaaggagagagaaggcacanttttccgggaaccaggncccagcaccttag

SEQ ID NO: 4518 - DNA, 268 bp, Homo sapiens; identical to SEQ ID NO: 3458
  misc_feature (1)..(268): n=a,t,g or c

SEQ ID NO: 4519 - DNA, 428 bp, Homo sapiens
  misc_feature (1)..(428): n=a,t,g or c
ttttttttttntacaaggagctttccacttgcttcagcatgcttaatcctcacatcaaccctgcttaggggacacaagctcagacagaggaagtgacttatccagagtcacacaggcagaaacccaggactgaagccacagcctttcaccacatccagctgtctttccatgaggggtaggggcagatcccccgagctggagcctccagggcagccctcgctcagggcagcactgtggtgacgctggtgagcaccacatgctcagagattttgggagatggagcatcggctctgcaagggacaaggacttgtgggctgggcanaggagcgggggactagggggcctttcagaggagccgcagggacccgggncagggcaggcaggcagggagaaggcagcctttaaactgcttccccggattttttccc

SEQ ID NO: 4520 - DNA, 254 bp, Homo sapiens
  misc_feature (1)..(254): n=a,t,g or c
ttttttttttttttttttttttttttttttttattgccaaganccaaagaaaaaattttatttacaatagagaattttatttgaaacatgcatttcttgtttttttaaaaacaaatcagcaaatgcagatcaagtttacactccttaaggcaagagtccctatgcacgctgtacatgttcatattaaatccaaaagctgctcacccggggaacttgtgtacaaagggcaaggccaaggtcagcaatgtgtcttt

SEQ ID NO: 4521 - DNA, 380 bp, Homo sapiens
  misc_feature (1)..(380): n=a,t,g or c
catacttaccagcngttttttattttaatatttttcccngttatatgtaatatacataacttcaaagcacatccgtacaaacctcctacaagctgcaccttcataatgagaaaccataagcatacaatgtctacttcccttcctgtggcttcgttttctgttcttgctttctttnctttttctcatttcaaaggagagtcatctgcagtggccctcagaaggaccaggncacagagggtgaagggtgtggggtnggggaagggggaagggggaggagggagccgagacagaaaatgacagcaagacattgagagttgagggtgaggggaggcgggagagaggaaggtaggttttgcagcccantttcaagatccagaaag

SEQ ID NO: 4522 - DNA, 294 bp, Homo sapiens; identical to SEQ ID NO: 214
  misc_feature (1)..(294): n=a,t,g or c

SEQ ID NO: 4523 - DNA, 179 bp, Homo sapiens
  misc_feature (1)..(179): n=a,t,g or c
acggggagagtgaggaggaaagaggaaaggaaggccagggtgggaggaaggancagctaaanctgagggaagaagaaggaaaggagagggactattncatagcagatgcaaatgaagggacttggggctagtcaggaagaaagggaaagggaaggaaggcaagagagaggggtgaaggg

SEQ ID NO: 4524 - DNA, 534 bp, Homo sapiens
  misc_feature (1)..(534): n=a,t,g or c
aatgtagtcataggggactgaggagcaagggtggccttgaagaggcaaanggaatgtccatttgctgagtttcccttccttatgtctccagtctggtgccaggtagtggagtaaaaaaggagacagtttatttttttattctatgtgcacacttacagtatacatatatatttatatcacaatttacgaaaccaaaaagttgagtttccaatggaacccttgttttttaataatcgactttttaaatgtgatcaggactataatattgtacagttattatagggcttttggggaaggggaggatagcgagaagatgctctggggggttttgtttttgcttttccttcagggttttatttttgactgttttgttttcttgttggccatttctgtattgctgggcatctgtgctaagcctttacagtgggcaaaaataatgacatgtaggcaaaggattttcaaaccaaaatatttttnccccttttggtaaaaanaactccgtgcccgaattcttgggcctcgagggccaaattc

SEQ ID NO: 4525 - DNA, 351 bp, Homo sapiens
tttttttagatgagaatttaagcttttattaataaatcatgattttctattgaatacataataaagtacaattaacaataacataacattacaacattaaaaattaaaactttcagaatcaccttgatcaatatataaagctttagttccttatttcaacagtgttcttctcatatgcaaaacagcttcccaaaataagagattcgtgaatgaaattttataaagcttcctgtgtaccaaagagattgactccacatcaactgtcccctactgaaaatccaaaccatacaggcttgaaggaccagaactgagccacattctattaaagttatcaaagataaaatcttaaag

SEQ ID NO: 4526 - DNA, 341 bp, Homo sapiens; identical to SEQ ID NO: 2329

SEQ ID NO: 4527 - DNA, 380 bp, Homo sapiens
  misc_feature (1)..(380): n=a,t,g or c
atgataaagttgatttaatgaatgcaactgactacataaaccaatatagccgtatgcatcagaatctggagcaagctcttacagatgactggagacgcacccagtgtggtgctgcctgagaccaaatgccatcccacgacaagggcctcctgcttcatgagaacacttaccgtcattcgaatctctttgagattaatgtgataatagacactatacattgcatatgcactgggcctcagcagatccttccaacttttcaaagtgaaaaaggacaaacgtaagtgangtttttaaagaggtggcgctcatccgatttttcccgctgtcctgtgtgcaggttctgctgaacacgcacctcccaatcagtatgttctgagagg

SEQ ID NO: 4528 - DNA, 212 bp, Homo sapiens; identical to SEQ ID NO: 3305
  misc_feature (1)..(212): n=a,t,g or c

SEQ ID NO: 4529 - DNA, 189 bp, Homo sapiens; identical to SEQ ID NO: 3306

SEQ ID NO: 4530 - DNA, 292 bp, Homo sapiens
tgaaaataatgatgctttatttgattgacatcacatcatcataaatggcatctaatttcagaaaacaaagttcaagtccgcaaaaaatgcatgtacaaatctaaggagataggtctacagaaatagacacgtggctctgtggtctgtaaggtcgcagtcaggaacctcacatcctagggtctgtctgggttcaatgttccagtggcgtgagacaaccaaggaaacagacaccccaaagagccgatgttatttttgaatatatatatatgtatatacatgtacatatgtaaat

SEQ ID NO: 4531 - DNA, 364 bp, Homo sapiens; identical to SEQ ID NO: 3
  misc_feature (1)..(364): n=a,t,g or c

SEQ ID NO: 4532 - DNA, 406 bp, Homo sapiens; identical to SEQ ID NO: 3132

SEQ ID NO: 4533 - DNA, 436 bp, Homo sapiens
  misc_feature (1)..(436): n=a,t,g or c
ctgattcaatgctgtatgttttattggagtttaacatgcctacatagtaaatacttggtaaatgtgctgaatgaccaaatgattcccaagatgagctagtcagctgaaagtccaaacatggggacttgggctggtaagcacctaggctttgaatcaaacagctacatctgaaagttttatgttagaataataacgccatgtattacatttctgtgcaataagtgaacccatctctagctcctctccccaccataatcacagcagtcagataaaaagttgaggagtttattagggaaatatgagaggcatagacactccaagtgacagaaagaaaagtctgaaaatgtcccttcaagccaagtgggggcctggcnttgacctctccaaatccacaagaaactggtgggttagcaacaacattctctggcggcacatt

SEQ ID NO: 4534 - DNA, 412 bp, Homo sapiens
gaagattaaacttcctcacagattttgataatgactttggaaatgatgactgaaatatttccctctgctttcttcctacctttgggcaacgtcccggagtgtaaatctagctgatattgcaaggttttgctttatttgatgaaccagcctatattaatgacataacttccaaggtacacagaatctaatactaacggtgcaataatttattggtataatttctacctccaaaggtaagtaacacaaatgtttcaggattacagtatatattatcaaactagtgtctttgcattaaaaacaaattatagctcagagatagagcttgctgtgatgtttagtttctgaaatgcattaaatttatccctcagtcttagaagaccgtgtgtctcaaattgggcatgtcctgcacttt

SEQ ID NO: 4535 - DNA, 515 bp, Homo sapiens
  misc_feature (1)..(515): n=a,t,g or c
gctaataaaacagttaagacaattgtccattttatttgttaaattgctaaaaagtcatcaggggaaaacattaacaaaaaatgaaattgacagatttaaatatcaatgaaatccatgtttcattcctacactgttatgtgcccaaaatgactatctcagggtaagccacctggcatccctgagttgtatgggaaacatcactcacagcaccagcttcgccagggcacatggggtgtgcactgacatgaaccctggttggngggaggggagcagagcaagtagagtgtacaatggagccaacacctaaagtttgctctcatttgacaatgaacacggtgagagggagccacttactggtaaccatgcagaacatgccttctgcagttcatggagaggctacatgggacgcaggcctggaaattcagcttcctcaccaccaggcgtggttagatcctcccactgacttgtgcgctggtaagagancatggataatgcaagtggagcatatcacatgc

SEQ ID NO: 4536 - DNA, 382 bp, Homo sapiens
tttttttgggtttaaaaatagctttatttagcataccaaaaacacagaaacataagaaagaccctacctagtataaacataaaaatagttaaataccataatttaatgtaaaccaagcatcttaaaatgagaaatattataataaaatacatactatttacacagaaccaagttaaagctacctccacagttattggatcacatcatcaatcttgaagtcatcattaaaaatgaagcaaacacaacatatctatctgtactggtcaataggaaaagaagaaatcattacatttactttaaggaagtataattttttgtgacatttagagcaaggaggcagaaagtgccaattctaggattccagacacaactactgcacatg

SEQ ID NO: 4537 - DNA, 188 bp, Homo sapiens; identical to SEQ ID NO: 1606

SEQ ID NO: 4538 - DNA, 294 bp, Homo sapiens
atttgtttgggagattcccagctagtttcagacttggtctgtgaaggaggcacactattttgcttggtatttgacttggatttatctgtctcttgtagtattggcggcacttgggaagagctcttgtcagaatcactttttgataagattacagatggctcggtagaagtagcaggtggaagagtcttgataggctggctatttttgacgagtacttcggctggatcactagtgcttatggtcttcaaggaaaaagctttttcctgttttggacgggttttagaggtattcact

SEQ ID NO: 4539 - DNA, 299 bp, Homo sapiens
gttttagttcagtttattttttaatatgtcctgagttctttctgttcataaaattatgatcttatgacagctgtaacttttaattaataatattaacaaatcattattgatataggcttttcaatttgctcaagattaggaattgtaagtggaatgaagcagcacttccagttgacaaatggatccaaaggtaatccaatgtcttttaaattaagcttgtgacaattaaaccaatacactgtagcaatgagaaaactattgacaaagtataaccagggaatattcatctcaatatatgc

SEQ ID NO: 4540 - DNA, 239 bp, Homo sapiens; identical to SEQ ID NO: 1942
  misc_feature (1)..(239): n=a,t,g or c

SEQ ID NO: 4541 - DNA, 347 bp, Homo sapiens
  misc_feature (1)..(347): n=a,t,g or c
ctgttgtttgttcacctttatttgtgaagtgctatgcccttggtttttccacttagttattaacatgaattagcaagtcaaaaaacatttactaacccacaaatacaaaacatttactagggtttccagtacttatttgaatgaattattagtttaggaggttaaagatggtaggaaaagtgtgtaatctgcgtgtcttctgtataccnaataataaaatatgtngtgaatctggttttaggtctagcacactgttttttttttaaagcagaaatagggggtttatttgatactagaactaaagaaataaggnagtttgatgccaaaacannttgttaattcttttt

SEQ ID NO: 4542 - DNA, 260 bp, Homo sapiens
  misc_feature (1)..(260): n=a,t,g or c
ttttttatgattgtaaaaattttattctcaataacaattccactaaaattatacaaagtacattcaatacttaagaatggcaaaggtggggagaggaggagaggaagccagtttggcctggaagcatcaacagttgactccaacaaaggaagcccagctgggctggnaggaagttgggggtggaggtccggttgtaaaaaataaaaaaggggatcggtaaaaaaaggccacccacaaggaagcagagtgagcgtgcatgt

SEQ ID NO: 4543 - DNA, 222 bp, Homo sapiens
ctgtgagagattttattttatcacctccaaaatgatgtttgcactgcttttgccagcctggtgaaagacagcccgcccacaagcagaactgaggctcctcggtgtctctatgtattaatgttgcggacaccacataggaagagagagttgtgatgggacccacaggagttgcaattaagcacgttgtcagggctacacgctctgccctttctctgctgggag

SEQ ID NO: 4544 - DNA, 614 bp, Homo sapiens
taaaatgtgaaaggagttctttttaatacccagggtaatacaatatccaagatataacattaagtgataaaaaacaaagtgtatgacagtatagatgacatcctacttatattttttgaagcccgcagattttatatgtatgtttgtgctttacatgcctagagtatctctggcagtgtgtgtaagaaatggatcaaaacagttgcctccagggagaggtaatgggtgccggagaagagagggaggcttaggttttccactagatacctatttgcgctttttaaattttgcaccatgtatgtattaagcattaaaaataactgagtttaaattaacagaaaagaaaagaaaacccagtgagcctatgaagtgttgattctcattttggtttcttttttcttttttttaaagatgaagattaagtttgttttatttattcttgattcctcttttgcctttcaaagtcatggtcatatattaagtaggagattccaggttctaaagtaaaatatcgaactgagatgacagcattagaaaaccaggcccaggacctgggattctgggctgagacaaagaactcaatcccaaaacacaattttctgataaattagaac

SEQ ID NO: 4545 - DNA, 400 bp, Homo sapiens; identical to SEQ ID NO: 3474

SEQ ID NO: 4546 - DNA, 399 bp, Homo sapiens; identical to SEQ ID NO: 3170

SEQ ID NO: 4547 - DNA, 245 bp, Homo sapiens; identical to SEQ ID NO: 3172

SEQ ID NO: 4548 - DNA, 361 bp, Homo sapiens; identical to SEQ ID NO: 1951

SEQ ID NO: 4549 - DNA, 394 bp, Homo sapiens
gcttctggaagctttgttctttaatgagccatggggtgatttgttcatcaagctgcttttgtgtagccatacagtgcatattttgagtgacacaaactgcactttatacagatggtatcttgttacccctcaaccccccagcaaagaaaaaaaaacaaaaaggaaattacaaagtgcctattgattgcatccggaatgtaatcagttccgtgggtgagataaatcattcttcttatagaattattctattaaacagtaaaatgttatatttcacaggatatggtccttttataatacagtttttaaaaaaaatttacactcagcatacttataaattacttaaaatccattaaaataatataatacgaatctgtagtccacacctttcccatag

SEQ ID NO: 4550 - DNA, 327 bp, Homo sapiens
ataggtatatatatatattttttgccttggaagggagaaactcatatcattttttgcaatcataaaaataagcaaaataaaataaaaacatttcatgctcattaaacaaattttagccaatagagaatagtggaaaaccaaacagccaaaatcttatcaataaaaccacctctgtttagtattttgagagaattattattatatttttggagatggggtttcactatgttgcttaggctggacttcaactcctgggctcaagcgatcctcttgcatcagcctcctgagtggctgggggtataagtgtgcatcattgcacctgccttt

SEQ ID NO: 4551 - DNA, 318 bp, Homo sapiens; identical to SEQ ID NO: 1957

SEQ ID NO: 4552 - DNA, 294 bp, Homo sapiens; identical to SEQ ID NO: 2974

SEQ ID NO: 4553 - DNA, 449 bp, Homo sapiens
ttttttttttttttttttttaccaccaaatggaaaagtcatttaattcaaaaatcatacgtccactcatttcatagggattgtcacataaaccaaccacatgtaagaaagccaagtttcagaggcctctgaacagaaattttgttttctttatagatatatttggtgacacaaaagcattttttaaaagcctgaacatggcaacagggctactaacagggacaaaggtctattctagtcacagattactttctaattacagcattggattctatgcacgagtcaatagtcaatactgaagtttagaacagtgcgttattttaaaagaaaacattaaagtgccatttaataagtactttattgatattatatcacacagcactttacagtatactcaaagatagcctaaattatgaattaaacatgcaaatattttcttttccaaaatgg

SEQ ID NO: 4554 - DNA, 416 bp, Homo sapiens
agtatgtacattcctctttatttaatacaacaacaaacacgtaacatatacaaaaagaaaaaacactcattaaaaggccctgtcacaaaggatagacaggaaacatctacactgaatcaaataaggctcttgcttcaaaaacaggggtttgctagctacacctggaatatgagcaaggctgttgcaaaaaaattaaaaaaaaaaaaaaaacacaaaaatccctgcactgaaggagtatattcatgggggtaatttactaaattcacaggtccatatttaggaatgtttatgccctctcacatatccaaaattcatcagggttttatgaaatgtgtgatttttttttggttaaaaaaatttacctgcccttcttttttcttaggaaggagtgataagagctttctaaaaactagaga

SEQ ID NO: 4555 - DNA, 208 bp, Homo sapiens
tttttttttttttttacaagacagagaaatctactttaatattcacatgtaaaagttacacatcacaagagattggacagtagcttagcgtaacatagctatagtgaaaatcatttttataaaaaaataatctagatgcggtcatcagaatttttggtctgcttaagttaatgtttgaagatcgacttttatccctgcttgaaggatt

SEQ ID NO: 4556 - DNA, 434 bp, Homo sapiens
gaataaaagagaaactttattttaattcagcatcttagttttaatgtaattataaaagtcaccaaaaattgacagaacactagaaaacaagtaattgctaaatcaaaatagaatatcgtatacttttaatctttcattttttttctttcaggtttttcagttgccttctttcctagatcacgtatttctatcgttgttccttttttattgttcctgtgaccactggagcactagtaataaatccttaactcaaataggttatatttaatttcagcacccaagctccaaatgcatcagctaaactgggttatagcatggagaatacctcagacgaccacagattttatttttgttaagattctatcaagactgaggcaaattataataaaagttctcatatcatagaaaacaaattacgtggaaaaggataaaca

SEQ ID NO: 4557 - DNA, 403 bp, Homo sapiens
tgctcatttactgtttttaatatgtagtcaaatatgacagcagtcttacacaaatagctccctcctcccccttctaaaatcccaaatttgttgactcctactgtaagtgaaaaacatggtttgcttctgaaaatagcaatcaacagcaaaaacacaggtaacatttggtccccaccagcttccacacctttaaagataaattgtgtcactgaggcagtcaatacactaaatttcttatcaaactattactaggggaaaaaaatcagatttcccacacactgtaagcagaaccgaaagagctgcagagaaacttggtttaagaagctgtgtgaagaaaacattaatgacttattgcaattgtaataatccccaggtaaaagatggatgtcaaattaatggactg

SEQ ID NO: 4558 - DNA, 383 bp, Homo sapiens
tttttttttttttctgtggtagtctttattattattttttagctattgatacatagcatggcagcaagattacatcagtaatgtaatataatacagcttttttcattgaagctttgtaccttactatactctaggctatttggagtgttcccccacttgcactaaagtacaactatgatgtctctactgcctctcccagtgaaatataaaaatattgcactacattacagatatagtttacaaatgtcattagcagcattactgagctttctataattgtggtctacagagttaaatacttttaaaacatgagtagattcttataaaaccaaagttttgcattatttcaacagctctttcaaatgcatcagtttcagcaacat

SEQ ID NO: 4559 - DNA, 342 bp, Homo sapiens
ttttaaaatgtacaattcagtgatttttataatattcacagagttgtgcaaccatcaccacaatcaatttggtgttttatttacttatttaaaatacagtagagatgaggtctcattgtattgtccaggttggtctcgaactcctggactcatgtgatcctcccaccttggtatttagttattttttagagatgtgatctcccactgtcacccaggctggagtgtagtggcccaatcatagctcattataaccttgaattcctgggctcaagtgatccttctgcctcagcacactaagtagctaggactacaggtgcacaccaccaaacccagctaattttg

SEQ ID NO: 4560 - DNA, 391 bp, Homo sapiens; identical to SEQ ID NO: 3945

SEQ ID NO: 4561 - DNA, 495 bp, Homo sapiens; identical to SEQ ID NO: 3193

SEQ ID NO: 4562 - DNA, 418 bp, Homo sapiens
ttgagacagagttttgctcttgttgcccaggctggagtctgtctcaaataaaataaaataaaataaaataaaataaaataataaaaaattgtcagccaggcacggtagctgcaactggttatctttatgtgttaatagctgaagcccaaactgtgggatgaaggctattggctgtctggagccctgaacaggtatgagtggaaataattcttaacagcatcaatgagcaaaatctataacctatgtaaagctgctgtctggttaccaagcacatctttccgctcaagaaccaacttcagggaaatggcacaaattacacaggaaaatcttctctctctggtgaagaaacagagaccgcccttgtagttaagtgctgaccgcagaactgcccactactggttatggtaaaggagctgtc

SEQ ID NO: 4563 - DNA, 408 bp, Homo sapiens
ttttgtggaaagacaccttgctttattactgttattattagttccatagtataattcatatatcacaaaaatcaccatttttaagcatatatttcagtgtcttttaccatattccaaaagttctgcaaccatcaccactacctaattccagaatattttcataatgccaaaaagcatgcctgtacctatgggcagtcactctccaattccccacttcttgcagtctctgacaaccactaatctaccttctctatatatagatgtacttgttctgggcacttaattcaacaaatggtcctgggacaactaaatatccacatgtaaaagaatcaagttagactccctccttgcacataaaaattaactcaaaatggatcagagacctaaaggtaggtggtaaaattataa

SEQ ID NO: 4564 - DNA, 372 bp, Homo sapiens
tttttttttttttttttgttttcccaaagaatcctgtattttaatgaatagctgaataaatagacattaattatgaaattcacattaagatagaagaaaatccaaacattctgattgctttatctcttaaatttgataactactacaaaacatactatttatgttagggtaaaaataagctgactcacaggagtgtaactgggaagtgctggcagatatatacagtaacatggaggagccatacaataaaagcgtttatatgtacatcattttttttctttttgtatggagaaatgctgccttataaaatcggaaaacacacagtagactacatgcaacaaggaccaatacaatgtgcacagcagaagaatc

SEQ ID NO: 4565 - DNA, 369 bp, Homo sapiens; identical to SEQ ID NO: 73

SEQ ID NO: 4566 - DNA, 444 bp, Homo sapiens; identical to SEQ ID NO: 3208

SEQ ID NO: 4567 - DNA, 440 bp, Homo sapiens; identical to SEQ ID NO: 2988
  misc_feature (1)..(440): n=a,t,g or c

SEQ ID NO: 4568 - DNA, 348 bp, Homo sapiens
ggcaacatttctytyattcaaattttattggaagtttacaaatgtattacagacatcagtaaaacatcatatccatttyacagggcacggvtctcaagcaaagtgttcagaacagtctctsgcagasccacaccaaaggcctgtybgcagaccttcttaacaaatagcttgacactcaacacagaacacagactctggcctgcctcaccttcccaggcccttygaggttttgtytatgcacttgvamtgaaagcaggagatggacaaagcaatcctgtggaggaaagaatgagcttaggagaggaaaacctgccsaagtcctaattybgctaaaaaaaattaattaaa

SEQ ID NO: 4569 - DNA, 231 bp, Homo sapiens; identical to SEQ ID NO: 1978
  misc_feature (1)..(231): n=a,t,g or c

SEQ ID NO: 4570 - DNA, 318 bp, Homo sapiens; identical to SEQ ID NO: 3224
  misc_feature (1)..(318): n=a,t,g or c

SEQ ID NO: 4571 - DNA, 263 bp, Homo sapiens
  misc_feature (1)..(263): n=a,t,g or c
ggcagaaaatagactttattccaagacagatttgtaaaagaatgtttttaaagggaaaggcaagtcacgctactaaatcaaacattgttcacaatttctggntcttcctcctccgcctggcactacagctgagccttggcggatatgcctcggggcctcggcgcagaggaacttagcctcgattctnttcctgaggggcttcttaacttttccaagccaggcagtnagcgtggtgggaggcttgggctggtgcctcggcagct

SEQ ID NO: 4572 - DNA, 406 bp, Homo sapiens
  misc_feature (1)..(406): n=a,t,g or c
tttttttttttttcacgtggaatggtgttttcattggtgttagttgggggaagaggttaatggttacagagccagggcctgggcaatggggtcaggntctccctgccctcaggngggcagtcggggctcctgctgtggtccgaagcccctcccccattgtgtcctctcaggcagttgatagaataaattccatttaaaatatatgcatttctctctgcttagaaaataacatttacaattgaaaagttaggacttntgggatctgttaaccccactgcctcccacccctgctagccctgcctcagtgagggaaggcgggggcaggagctgcctggggcaccaccgctgtgtatttacatgtcctntgtaacacctnacggagaggggggcccggccagnacacaag

SEQ ID NO: 4573 - DNA, 319 bp, Homo sapiens
  misc_feature (1)..(319): n=a,t,g or c
tcttacaatctcattaagacagtagtagctttattattatnctatttccaccaatgaggaaatgagagtttacagaacttaactcatttgtcatcatcactcgttcacaggtgatgaagcaggactagaatccatgtctatctagatccaaggccactttttttttttaaatagagatggggtctcgccctgtagcccagggctggttctcgaactcctagggctcaagtgatcctccacctcagncctctcaaaagtgagagggcatgagccaccacacccggccagggccacactcttcttaaccactacattctag

SEQ ID NO: 4574 - DNA, 290 bp, Homo sapiens
  misc_feature (1)..(290): n=a,t,g or c
ataagangaaatttaattcaataatttgattcatcactactggaaaactacatctttctnccctgtcagtactggatggcaatgacgtgaaagcagctttccngggtctcaacttcccttcaatgggaagcattatggaatttcagcagtgaacatcatctgggttcctattcaaaccccagctccaaggaaaatgtgaggagagaatctaaggatataagtnctgttcaagggcaagaaggtttccaatctcaaatatttnatggccaacaacttatggttataccngc

SEQ ID NO: 4575 - DNA, 443 bp, Homo sapiens; identical to SEQ ID NO: 3951
  misc_feature (1)..(443): n=a,t,g or c

SEQ ID NO: 4576 - DNA, 383 bp, Homo sapiens; identical to SEQ ID NO: 685
  misc_feature (1)..(383): n=a,t,g or c

SEQ ID NO: 4577 - DNA, 363 bp, Homo sapiens; identical to SEQ ID NO: 129

SEQ ID NO: 4578 - DNA, 189 bp, Homo sapiens
  misc_feature (1)..(189): n=a,t,g or c
taaaggcacagctttcccagtgtttgtgttccttgcttgcgccctgttttaatgttgtagttacaggtgtccagcagggaggaatgcagcccctgtgggcattgggggagctgctgggaatccaagttcaaggagcagctgttttctgttttctgttgccccacagcgccanctctgggccccttgggg

SEQ ID NO: 4579 - DNA, 413 bp, Homo sapiens; identical to SEQ ID NO: 3256

SEQ ID NO: 4580 - DNA, 454 bp, Homo sapiens
  misc_feature (1)..(454): n=a,t,g or c
aacttaaaaagcagctagtttttatttcctaggttcgttccaccagtcataaaccagatgaaatctatggcatgattgaaagactatctcctggcactcgcaagattgagttatttggacgaccacacaatgtgcaacccaactggtaaggtgaccagagaacaggctagtcctcaaggggctattatttatgattaaggacagaacttagtagagcttcacattgttttacactagtccataaatgagcttcacaggattcataagccacttaagcttgtatttaaactgttttatgagattctacaaatattcattagaaactcaacaggttctaggacccaaaagcactgctccctagggtttctactctctttcacaacccaagggatcttcctcagccattctgtgatgtattgnatctggcccctgggtgggttacgaagntatctaa

SEQ ID NO: 4581 - DNA, 163 bp, Homo sapiens; identical to SEQ ID NO: 3260
  misc_feature (1)..(163): n=a,t,g or c

SEQ ID NO: 4582 - DNA, 231 bp, Homo sapiens; identical to SEQ ID NO: 200

SEQ ID NO: 4583 - DNA, 447 bp, Homo sapiens; identical to SEQ ID NO: 3265
  misc_feature (1)..(447): n=a,t,g or c

SEQ ID NO: 4584 - DNA, 417 bp, Homo sapiens; identical to SEQ ID NO: 475
  misc_feature (1)..(417): n=a,t,g or c

SEQ ID NO: 4585 - DNA, 295 bp, Homo sapiens; identical to SEQ ID NO: 1995
  misc_feature (1)..(295): n=a,t,g or c

SEQ ID NO: 4586 - DNA, 324 bp, Homo sapiens; identical to SEQ ID NO: 1998
  misc_feature (1)..(324): n=a,t,g or c

SEQ ID NO: 4587 - DNA, 382 bp, Homo sapiens
  misc_feature (1)..(382): n=a,t,g or c
gatttgagtntttnatttataaatgtacatttactataaaagctgttgcattttagacaacttgttgtttttattttttactgtttctcagaggcattttagaataaatactttaaatgaaagttagtataaccgatatagaacactggcccacccagagcagtaacatcttttgggacgggactcacatatgagggtgggatcatttcagtttgttaaatcttacactgcgtataggataacctataatatggtattgcattaatcacactacatnggaaggggaattgcatgggggaaggtccgcttaggtggaaaaaccaaaagggtccccccttattttttntttaagnggggggggggccttggccctttggggggg

SEQ ID NO: 4588 - DNA, 385 bp, Homo sapiens; identical to SEQ ID NO: 213
  misc_feature (1)..(385): n=a,t,g or c

SEQ ID NO: 4589 - DNA, 212 bp, Homo sapiens
  misc_feature (1)..(212): n=a,t,g or c
gtgtttaagtnaaatactctccaaatgtaatacaattcttcagctaaaacaggaataatgagacaaaatggttcgaaaagtacaatagaaaaatattgttcactggtttatttttccaaatgagcatcaggctatttacaaatacgcagccctccaatgacgtgtattaaaatgggcaagtctatcactgtttgaaatctaaatgaaaacaa

SEQ ID NO: 4590 - DNA, 347 bp, Homo sapiens
  misc_feature (1)..(347): n=a,t,g or c
cttccatcannncacttttattatatggtgaagcatccttagtgtgaaattaatggttagatatataaatgcatggcataacatgagaaaatctaggagaaaatatcctcattttaatctaagactatggaattatcaattccaattagacttaatcagcaacttacctttttcaaaaaaagcaaatgcacaaataggcttgataatttaactcttcttaactattaaggctctaggatgtccttaacttttttaaaagancattttaaaaccaaagcactaatttctatacacagtaaaaacaggtacaaatatctgagtttcagatctggcttttgctaggatag

SEQ ID NO: 4591 - DNA, 145 bp, Homo sapiens; identical to SEQ ID NO: 3505
  misc_feature (1)..(145): n=a,t,g or c

SEQ ID NO: 4592 - DNA, 448 bp, Homo sapiens
  misc_feature (1)..(448): n=a,t,g or c
ttacatgttatcttttaagacctgtaaggacatgactagtctatttagccagagggcccaaatcactcactgagacaaaacaaagaagagccaaagttccagagggacctgagagctgggttcaggtttcctgcactgtaactctccataggacagtgtcagtaggatgtgccactctgttaagagccaaataagtcacacaaattcagtattctggaaatgaagacttcacaggccaaggatgtttggggatttagccattgcaacaattcttcatctgtgggtgactttttgggaattgggtcccggttaggattgggtaatgggatctgctggtcatccttgtcagttctctttttcacttctcgaggcaagggtgcaggaacagcctccactatgttaggaaccctctttgggcacttgttttcacaggnttaatgnccccnac

SEQ ID NO: 4593 - DNA, 382 bp, Homo sapiens; identical to SEQ ID NO: 1187
  misc_feature (1)..(382): n=a,t,g or c

SEQ ID NO: 4594 - DNA, 181 bp, Homo sapiens
ttttttcaagtgaacatacaacttttctttataagtatgtaaataaatttcatagcactacaaaaatatcaatgtcatctgagaagtttacagtggtcccagtactgtaggagagaattaaataaaataaaatagctgtagataattaaaagctaattagataaatcaagttacagtatca

SEQ ID NO: 4595 - DNA, 194 bp, Homo sapiens
  misc_feature (1)..(194): n=a,t,g or c
acaaatattttacatttattataggaatacaataaagaggttctgcagacacatgagtggtaactggtctattggaaaagaaaagacaattaaaaaatgatctaagtttacaaaaatgntgantcatgctttaaaaatgtagaaacanttaaaaantatcctacaatgttagccaangttcaaagtgtatttct

SEQ ID NO: 4596 - DNA, 333 bp, Homo sapiens
  misc_feature (1)..(333): n=a,t,g or c
ccgctcgagttttttttttttttttttgtgctcaaacattttaatcatttctgccctgtnactcccaccccagatccaagcgccanccagttccggtgggggctcagtcctccggagtccaggagtcagggctcgggggcgctcagcggccagtgggcaagattggggcctttcctgtcctcgaagntgcacaaaggtggncccagcccagancacagggagagggcagagagatgtgctcatcagtcttggcaggcgggccgggagcagtcttccagaaacaggtgggagccagggctnattttcatagccaagggtcccatgagcttccca

SEQ ID NO: 4597 - DNA, 283 bp, Homo sapiens
  misc_feature (1)..(283): n=a,t,g or c
gcaaatcataaggaagtttttattgggtcctgtacagaagagaaatgctccgttgtcaaaaaactacaaagggatccctggctctgggtgtgctatgaagacaactccctccccagtnagcccagggaacaggctggatgctggacaaagtttgggagggagctccaggnccagggtcctccanttggggtctccccctttatgtttntaaaaaccgcagnttggagtatttagaggnctntgtcccctgcaagtattgccgttggntatgaaacacacagag

SEQ ID NO: 4598 - DNA, 163 bp, Homo sapiens; identical to SEQ ID NO: 771

SEQ ID NO: 4599 - DNA, 548 bp, Homo sapiens
  misc_feature (1)..(548): n=a,t,g or c
tggggcagananaagnnctttattgatnnnntcagnaatgcagggctggcacccatcagcttcaaaccacatcttatcgcatccactcctntccncttccnnncccattttgccctntttcagggtgaaatcttgctttcaggcaagggcttccggccagccttgcattagttctcagctatggtcttctgaacccagtcctgggatggaagtcaccttcacatacacaccatactcagccacagcacagctcttatcaaagcttaagatcccagtcgcataccagggtgtcctcctccaggggtcgtggaacgggcaaagggcactgcccgcatcgccataggcagggtgtctttcttgggtactttaggacatggccaggcacaggagggtgtgtttcatttcagtatgggggcttgcacccctacangggctctttcgggtgttcttctttttcgggggacttgttgctggcctttcataatgncttatggatttgggttttgggtcaggcacagganggcattgacatacttcagatggggnca

SEQ ID NO: 4600 - DNA, 418 bp, Homo sapiens
  misc_feature (1)..(418): n=a,t,g or c
tttttttttaattccaaggagtgggaaggttttaatgagcatcccagagggccnaggggatacaaactccaaatccagcctttatatcatcattatttcaagcaacaggaggaggctcagcttgcttagctcattcccagatgaagaggcagctggagggaagtccctgaaagtgcctntctacccagcagaggggntaagggaaagtggagaggtntctgctgntgctnctgctgctgctgctgctgttgctgctaccantgccaccaagagcagggagacctcaagcaccaagctgacctttgggaggtcagggacggacccagattcaggcaggattttgggcaggaacatcagacattggganggttagatgcagacttgaacaggttaagaaacctnttaaggggtcccccgg

SEQ ID NO: 4601 - DNA, 339 bp, Homo sapiens
  misc_feature (1)..(339): n=a,t,g or c
tttttctgaaaatcagccttttaatctagttgaacccaacgagtgnaggaaagaactaaaacatttttttccttcagattttgattataagaataactgggtcagaggtgtcttttccataggaaactgacatcccctatgtcctcaganttnttttttttttttttttntncaaaaaaatgcataaaagattttcaacncatgngcatgccacacatttccatccccaccccaccctgccccaccctctacaggcacacatattcacacaccaaaggganttcttcccgtaaccggggaacagaatgtaaaanattccatccaagnggccaccgntac

SEQ ID NO: 4602 - DNA, 492 bp, Homo sapiens; identical to SEQ ID NO: 3290
  misc_feature (1)..(492): n=a,t,g or c

SEQ ID NO: 4603 - DNA, 493 bp, Homo sapiens; identical to SEQ ID NO: 221
  misc_feature (1)..(493): n=a,t,g or c

SEQ ID NO: 4604 - DNA, 389 bp, Homo sapiens
  misc_feature (1)..(389): n=a,t,g or c
acagggacatgntaggaaacgatgaacctaactgggcatgaagatgtctagggaaaaaacaaggaagagtaaaaagttacacagaatctatgcagcggcaacaaaatcacttttaagggtgcaggagaaaaactaatgcaaatcttaggtcattagggagtctccgagccattcacataatttgcatttcttacactccttatccacagcacaatgaaaccccaagagaatccatctggagagagcgaaaggggatggattccgggtgttttggggtnagggacagggggagaaggtccngtttcaacaaatgtgacatacggggaaagtcagacgactttaactntaaacttngataatggnagttacaaacccaaataatcaggcag

SEQ ID NO: 4605 - DNA, 305 bp, Homo sapiens; identical to SEQ ID NO: 222
  misc_feature (1)..(305): n=a,t,g or c

SEQ ID NO: 4606 - DNA, 429 bp, Homo sapiens; identical to SEQ ID NO: 2013
  misc_feature (1)..(429): n=a,t,g or c

SEQ ID NO: 4607 - DNA, 419 bp, Homo sapiens; identical to SEQ ID NO: 3212

SEQ ID NO: 4608 - DNA, 2383 bp, Homo sapiens; identical to SEQ ID NO: 3214

SEQ ID NO: 4609 - DNA, 1137 bp, Homo sapiens; identical to SEQ ID NO: 664

SEQ ID NO: 4610 - DNA, 2491 bp, Homo sapiens; identical to SEQ ID NO: 164

SEQ ID NO: 4611 - DNA, 2061 bp, Homo sapiens
tgttccgcgatcttctcaggctctcctagcagcatccatcgccgccaccctatcttcactggcttcaccttctccttctctcttcgttgctgagcgacaagcttcctagcgctatgactgtcgtctccgtcccgcagcgggagccgctcgtcctgggtggccgccttgcgccgcttggcttttcctcccgaggttactttggggccctcccgatggtgaccacggctccgcctcctttaccccggatcccggacccccgggcactgcccccgaccctcttcctccctcatttcctagggggagatggcccgtgtctgaccccccagcctcgcgctccagcagctctgcccaaccgcagcctcgccgtggcgggaggcactcctcgggcagcgccgaagaagcggcgaaagaagaaggtgcgggccagccccgcagggcagctgcccagccgcttccaccagtaccagcagcaccggccgagtctggagggcggccggagccccgcgaccggcccgagcggagcgcaggaggtcccgggcccggccgccgccttggccccgagtcctgcagccgcagccggcacggagggagccagccccgaccttgccccgctgcggcccgcggctcccggccaaacccccctcaggaaagaggttttaaaatcaaagatgggaaaatcggagaaaattgcccttccccatggccagcttgttcatggtatacacttgtatgagcaaccaaagataaacagacagaaaagcaaatataacttgccactaaccaagatcacctctgcaaaaagaaatgaaaacaacttttggcaggattctgtttcatctgacagaattcagaagcaggaaaaaaagccttttaaaaataccgagaacattaaaaattcgcatttgaagaaatcagcatttctaactgaagtgagccaaaaggaaaattatgctggggcaaagtttagtgatccaccttctcctagtgttcttccaaagcctcctagtcactggatgggaagcactgttgaaaattccaaccaaaacagggagctgatggcagtacacttaaaaaccctcctcaaagttcaaacttagatttcagatttcagtatgtgtgtaaaacataatttttcccatatccctggactcttgagaaaattggtacagaaatggaaatttgccttgttgcaacatacaattgcaaaagatgagtttaaaaaattacatacaaacagcttgtattatattttatattttgtaaatactgtataccatgtattatgtgtatattgttcatacttgagaggtatattatagttttgttatgaaagtatgtattttgccctgcccacattgcaggtgttttgtatatatacaatggataaattttaagtgtgtgctaaggcacatggaagaccgattttatttgcacaaggtactgagatttttttcaagaaacagctgtcaaatctcaaggtgaagatctaaatgtgaacagtttactaatgcactactgaagtttaaatctgtggcacaatcaatgtaagcatggggtttgtttctctaaattgatttgtaatctgaaattactgaacaactcctattcccatttttgctaaactcaatttctggttttggtatatatccattccagcttaatgcctctaattttaatgccaacaaaattggttgtaatcaaattttaaaataataataatttggcccccccttttaaaatagtcttgactctttgtgtgtgactgtttctcatgtttgaatgtgtgactaggagatgattttgtgtggttggatttttttgacttctactttactggctgagtgtgagccgccatgcctggccataatctacattttcttaccaggagcagcattgaggtttttgagcatagtacttgactactctagaggctgagacgggagcatctcttgagcctgagaagtggagattgcaattgagctaggatcaggccactgcactccagcctgggtaacagacgctgtctcaaaaaaaaggccaagagaaagtaagggagacaga

SEQ ID NO: 4612 - DNA, 2512 bp, Homo sapiens; identical to SEQ ID NO: 2425

SEQ ID NO: 4613 - DNA, 1908 bp, Homo sapiens; identical to SEQ ID NO: 3293

SEQ ID NO: 4614 - DNA, 577 bp, Homo sapiens
caccactgctttagaggccagatttttctggaggggattcctctacacatgctacctccagttagcaggaggggaaggaagggttgggagtcttggggagtctcaccatcaactcctcctcctgctgctgttccatttgcctcagacatggagttggagctgctgcggggcagccaggccatcatgctgcgctcagcggacctgacaggactggagaagcgtgtggagcagatccgtgaccacatcaatgggcgcgtgctctactatgccacctgcaagtgatgctacagcttccagcccgttgccccactcatctgccgcctttgcttttggttggggggcagattgggttggaatgctttccatctccaggagactttcatgtagcccaaagtacagcctggaccacccctggtgtgtacctagtaagattaccctgagctgcagctgagcctgagccaatgggacagttacacttgacagacaaagatggtggagattggcatgccattgaaactaagagctctcaagtcaaggaagctgggctgggcagtatcccccgcctttagttctccac

SEQ ID NO: 4615 - DNA, 3100 bp, Homo sapiens; identical to SEQ ID NO: 3294

SEQ ID NO: 4616 - DNA, 7720 bp, Homo sapiens; identical to SEQ ID NO: 3973

SEQ ID NO: 4617 - DNA, 1280 bp, Homo sapiens
aaaagaacgaatccagcaccaaaacgtgctacaacatggatgaacttcgatgactttgtgccacatgaaagaagaagccagccacaaaaggccatatattgtatgaaatgaaatgtccagaatgggcaaacccatagagacacaaaaatctccgccacctccctactctcggctgtctcctcgcgacgagtacaagccactggatctgtccgattccacattgtcttacactgaaacggaggctaccaactccctcatcactgctccgggtgaattctcagacgccagcatgtctccggacgccaccaagccgagccactggtgcagcgtggcgtactgggagcaccggacgcgcgtgggccgcctctatgcggtgtacgaccaggccgtcagcatcttctacgacctacctcagggcagcggcttctgcctgggccagctcaacctggagcagcgcagcgagtcggtgcggcgaacgcgcagcaagatcggcttcggcatcctgctcagcaaggagcccgacggcgtgtgggcctacaaccgcggcgagcaccccatcttcgtcaactccccgacgctggacgcgcccggcggccgcgccctggtcgtgcgcaaggtgccccccggctactccatcaaggtgttcgacttcgagcgctcgggcctgcagcacgcgcccgagcccgacgccgccgacggcccctacgaccccaacagcgtccgcatcagcttcgccaagggctgggggccctgctactcccggcagttcatcacctcctgcccctgctggctggagatcctcctcaacaaccccagatagtggcggccccggcgggaggggcgggtgggaggccgcggccaccgccacctgccggcctcgagaggggccgatgcccagagacacagcccccacggacaaaaccccccagatatcatctacctagatttaatataaagttttatatattatatggaaatatatattatacttgtaattatggagtcatttttacaatgtaattatttatgtatggtgcaatgtgtgtatatggacaaaacaagaaagacgcactttggcttataattctttcaatacagatatattttctttctcttcctccttcctcttccttactttttatatatatatataaagaaaatgatacagcagagctaggtggaaaagcctgggtttggtgtatggtttttgagatattaatgcccagacaaaaagctaataccagtcactcgataataaagtattcgcattataaaaaaga

SEQ ID NO: 4618 - DNA, 1800 bp, Homo sapiens; identical to SEQ ID NO: 256

SEQ ID NO: 4619 - DNA, 577 bp, Homo sapiens
gagctccgacggcactgacggccatggcgcgttcgaacctcccgctggcgctgggcctggccctggtcgcattctgcctcctggcgctgccacgcgatgcccgggcccggccgcaggagcgcatggtcggagaactccgggacctgtcgcccgacgacccgcaggtgcagaaggcggcgcaggcggccgtggccagctacaacatgggcagcaacagcatctactacttccgagacacgcacatcatcaaggcgcagagccagctggtggccggcatcaagtacttcctgacgatggagatggggagcacagactgccgcaagaccagggtcactggagaccacgtcgacctcaccacttgccccctggcagcaggggcgcagcaggagaagctgcgctgtgactttgaggtccttgtggttccctggcagaactcctctcagctcctaaagcacaactgtgtgcagatgtgataagtccccgagggcgaaggccattgggtttggggccatggtggagggcacttcaggtccgtgggccgtatctgtcacaataaatggccagtgctgcttcttgc

SEQ ID NO: 4620 - DNA, 2061 bp, Homo sapiens
ggatcccagcaagcgtcctttatgtatgaaaaggaagaagaaaatttccccatgaaacatattcaaagtagagaacaatctttttgattccattgttattttaattgtatacagacataggagtctttgcataattagacttttccttctttcaggactgtggatgcaaagccctggacccccagacgttataggacattactcctcagctttgcagcccggtgatgtgaagcgaaacaccatttccccttttttatggcggaagaaaacagaacacaactgcaaaggggcttttccctcccctgctcatcctctttccccaaatgaattttggtttgctgtggactctattctgctgaggaactgttcttgttgggcaaatgtagatcttgtctactctgtggcaggaaaaggccttttctttcattttgtaagaaagagcacagagttcctcctgtacctgctccagctgtgcctgcagcccctcacggccgggtgatgccattcccaaactgctcagcccccagcactgtggtggccacagctgtgggtgtcttgctggggctggagtgtgggctgggtctgctgggcaacgcggtggcgctgtggaccttcctgttccgggtcagggtgtggaagccgtacgctgtctacctgctcaacctggccctggctgacctgctgttggctgcgtgcctgcctttcctggccgccttctacctgagcctccaggcttggcatctgggccgtgtgggctgctgggccctgcgcttcctgctggacctcagccgcagcgtggggatggccttcctggccgccgtggctttggaccggtacctccgtgtggtccaccctcggcttaaggtcaacctgctgtctcctcaggcggccctgggggtctcgggcctcgtctggctcctgatggtcgccctcacctgcccgggcttgctcatctctgaggccgcccagaactccaccaggtgccacagtttctactccagggcagacggctccttcagcatcatctggcaggaagcactctcctgccttcagtttgtcctcccctttggcctcatcgtgttctgcaatgcaggcatcatcagggctctccagaaaagactccgggagcctgagaaacagcccaagcttcagcgggcccaggcactggtcaccttggtggtggtgctgtttgctctgtgctttctgccctgcttcctggccagagtcctgatgcacatcttccagaatctggggagctgcagggccctttgtgcagtggctcatacctcggatgtcacgggcagcctcacctacctgcacagtgtcgtcaaccccgtggtatactgcttctccagccccaccttcaggagctcctatcggagggtcttccacaccctccgaggcaaagggcaggcagcagagcccccagatttcaaccccagagactcctattcctgacaacagccagcgtcctcaacgcccgtgtttatggaactacctgcgacctaaataataattactcctactttgggattctggaagaagaagaagtcttaagactgcaatacaaggatcagagcataaacatgggcacagttgctgcaggtgtggtcttatactttgttgaccagggtggtcctctgtgattttaccttgtagagtggcaaatcaaaaatgaacaagctagaacctcctcctacccaactatgatgcagattcagttgctgaactgaaaagtcgggcagctactccatctccacacttgaagaaaatgtaatttgctaaatcagtgaaggaagagaagaaagccgggtgatggcatctttccaactcttacttggtctcagcaagtcattttcatttattatgcttcagttttaaatacaaaaaaaaaactatgttttcttcccacctgctgtgcagactggggatgaccgacatcagaaagtgccctggttctaaaaagagactctgctgtatataaggtactgtcgtacatgctagcctttatttggaacataacatttttgttttcataaaattttgcttcatttttctaga

SEQ ID NO: 4621 - DNA, 4244 bp, Homo sapiens
ggcgcagtagcagcgagcagcagagtccgcacgctccggcgaggggcagaagagcgcgagggagcgcggggcagcagaagcgagagccgagcgcggacccagccaggacccacagccctccccagctgcccaggaagagccccagccatggaacaccagctcctgtgctgcgaagtggaaaccatccgccgcgcgtaccccgatgccaacctcctcaacgaccgggtgctgcgggccatgctgaaggcggaggagacctgcgcgccctcggtgtcctacttcaaatgtgtgcagaaggaggtcctgccgtccatgcggaagatcgtcgccacctggatgctggaggtctgcgaggaacagaagtgcgaggaggaggtcttcccgctggccatgaactacctggaccgcttcctgtcgctggagcccgtgaaaaagagccgcctgcagctgctgggggccacttgcatgttcgtggcctctaagatgaaggagaccatccccctgacggccgagaagctgtgcatctacaccgacaactccatccggcccgaggagctgctgcaaatggagctgctcctggtgaacaagctcaagtggaacctggccgcaatgaccccgcacgatttcattgaacacttcctctccaaaatgccagaggcggaggagaacaaacagatcatccgcaaacacgcgcagaccttcgttgccctctgtgccacagatgtgaagttcatttccaatccgccctccatggtggcagcggggagcgtggtggccgcagtgcaaggcctgaacctgaggagccccaacaacttcctgtcctactaccgcctcacacgcttcctctccagagtgatcaagtgtgacccagactgcctccgggcctgccaggagcagatcgaagccctgctggagtcaagcctgcgccaggcccagcagaacatggaccccaaggccgccgaggaggaggaagaggaggaggaggaggtggacctggcttgcacacccaccgacgtgcgggacgtggacatctgagggcgccaggcaggcgggcgccaccgccacccgcagcgagggcggagccggccccaggtgctccactgacagtccctcctctccggagcattttgataccagaagggaaagcttcattctccttgttgttggttgttttttcctttgctctttcccccttccatctctgacttaagcaaaagaaaaagattacccaaaaactgtctttaaaagagagagagagaaaaaaaaaatagtatttgcataaccctgagcggtgggggaggagggttgtgctacagatgatagaggattttataccccaataatcaactcgtttttatattaatgtacttgtttctctgttgtaagaataggcattaacacaaaggaggcgtctcgggagaggattaggttccatcctttacgtgtttaaaaaaaagcataaaaacattttaaaaacatagaaaaattcagcaaaccatttttaaagtagaagagggttttaggtagaaaaacatattcttgtgcttttcctgataaagcacagctgtagtggggttctaggcatctctgtactttgcttgctcatatgcatgtagtcactttataagtcattgtatgttattatattccgtaggtagatgtgtaacctcttcaccttattcatggctgaagtcacctcttggttacagtagcgtagcgtggccgtgtgcatgtcctttgcgcctgtgaccaccaccccaacaaaccatccagtgacaaaccatccagtggaggtttgtcgggcaccagccagcgtagcagggtcgggaaaggccacctgtcccactcctacgatacgctactataaagagaagacgaaatagtgacataatatattctatttttatactcttcctatttttgtagtgacctgtttatgagatgctggttttctacccaacggccctgcagccagctcacgtccaggttcaacccacagctacttggtttgtgttcttcttcatattctaaaaccattccatttccaagcactttcagtccaataggtgtaggaaatagcgctgtttttgttgtgtgtgcagggagggcagttttctaatggaatggtttgggaatatccatgtacttgtttgcaagcaggactttgaggcaagtgtgggccactgtggtggcagtggaggtggggtgtttgggaggctgcgtgccagtcaagaagaaaaaggtttgcattctcacattgccaggatgataagttcctttccttttctttaaagaagttgaagtttaggaatcctttggtgccaactggtgtttgaaagtagggacctcagaggtttacctagagaacaggtggtttttaagggttatcttagatgtttcacaccggaaggtttttaaacactaaaatatataatttatagttaaggctaaaaagtatatttattgcagaggatgttcataaggccagtatgatttataaatgcaatctccccttgatttaaacacacagatacacacacacacacacacacacacacaaaccttctgcctttgatgttacagatttaatacagtttatttttaaagatagatccttttataggtgagaaaaaaacaatctggaagaaaaaaaccacacaaagacattgattcagcctgtttggcgtttcccagagtcatctgattggacaggcatgggtgcaaggaaaattagggtactcaacctaagttcggttccgatgaattcttatcccctgccccttcctttaaaaaacttagtgacaaaatagacaatttgcacatcttggctatgtaattcttgtaatttttatttaggaagtgttgaagggaggtggcaagagtgtggaggctgacgtgtgagggaggacaggcgggaggaggtgtgaggaggaggctcccgaggggaaggggcggtgcccacaccggggacaggccgcagctccattttcttattgcgctgctaccgttgacttccaggcacggtttggaaatattcacatcgcttctgtgtatctctttcacattgtttgctgctattggaggatcagttttttgttttacaatgtcatatactgccatgtactagttttagttttctcttagaacattgtattacagatgccttttttgtagttttttttttttttatgtgatcaattttgacttaatgtgattactgctctattccaaaaaggttgctgtttcacaatacctcatgcttcacttagccatggtggacccagcgggcaggttctgcctgctttggcgggcagacacgcgggcgcgatcccacacaggctggcgggggccggccccgaggccgcgtgcgtgagaaccgcgccggtgtccccagagaccaggctgtgtccctcttctcttccctgcgcctgtgatgctgggcacttcatctgatcgggggcgtagcatcatagtagtttttacagctgtgttatwctttgcgtgtagctatggaagttgcataattattattattattattataacaagtgtgtcttacgtgccaccacggcgttgtacctgtaggactctcattcgggatgattggaatagcttctggaatttgttcaagttttgggtatgtttaatctgttatgtactagtgttctgtttgttattgttttgttaattacaccataatgctaatttaaagagactccaaatctcaatgaagccagctcacagtgctgtgtgccccggtcacctagcaagctgccgaaccaaaagaatttgcaccccgctgcgggcccacgtggttggggccctgccctggcagggtcatcctgtgctcggaggccatctcgggcacaggcccaccccgccccacccctccagaacacggctcacgcttacctcaaccatcctggctgcggcgtctgtctgaaccacgcgggggccttgagggacgctttgtctgtcgtgatggggcaagggcacaagtcctggatgttgtgtgtrtcgagaggccaaaggctggtggcaagtgcacggggcacagcggagtctgtcctgtgacgcgcaagtctgagggtctgggcggcgggcggctgggtctgtgcatttctggttgcaccgcggcgcttcccagcaccaacatgtaaccggcatgtttccagcagaagacaaaaagacaaacatgaaagtctagaaataaaactggtaaaaccccaaaaaaaaaaaaaaaa

SEQ ID NO: 4622 - DNA, 874 bp, Homo sapiens; identical to SEQ ID NO: 2043

SEQ ID NO: 4623 - DNA, 511 bp, Homo sapiens; identical to SEQ ID NO: 823
  misc_feature (1)..(511): n=a,t,g or c

SEQ ID NO: 4624 - DNA, 838 bp, Homo sapiens; identical to SEQ ID NO: 2051

SEQ ID NO: 4625 - DNA, 3451 bp, Homo sapiens; identical to SEQ ID NO: 3241

SEQ ID NO: 4626 - DNA, 4268 bp, Homo sapiens; identical to SEQ ID NO: 3320
  misc_feature (1)..(4268): n=a,t,g or c

SEQ ID NO: 4627 - DNA, 2279 bp, Homo sapiens; identical to SEQ ID NO: 3296

SEQ ID NO: 4628 - DNA, 14800 bp, Homo sapiens
cgcccgggcaggtggcggcagagctgaagtgagcggagccaccaggaggccatgtcgggtgaggacgctgaggtccgggcagtctctgaagatgtctccaatggaagcagtggctcgcccagccctggggacacactgccctggaaccttgggaaaacgcagcggagccggcgcagcgggggtggcgctgggagcaacgggagtgtcctggacccagctgagcgggcggtcattcgcatcgcagatgagcgggatcgtgtgcagaagaaaaccttcaccaagtgggtcaacaagcacctcatcaaggcccagaggcacatcagtgacctgtatgaagacctccgcgatggccacaacctcatctccctgctggaggtcctctcgggggacagcctgccccgggagaaggggaggatgcgtttccacaagctgcagaatgtccagattgccctggactacctccggcaccgccaggtgaagctggtgaacatcagggatgatgacatcgctgacggcaaccccaagctgacccttggcctcatctggacaatcattctgcacttccagatctcagatatccaggtgagtgggcagtcggaggacatgacggccaaggagaagctgctgctgtggtcgcagcgaatggtggaggggtaccagggcctgcgatgcgacaacttcacctccagctggagagacggccgcctcttcaatgccatcatccaccggcacaagcccctgctcatcgacatgaacaaggtgtaccggcagaccaacctggagaacctggaccaggccttctctgtggcggagcgggacctgggagtgacgcggctcctggaccctgaggacgtggatgtccctcagcccgacgagaagtccatcatcacctacgtctcgtcgctgtatgacgccatgccccgcgtgccggacgtgcaggatggggtgagggccaacgagctgcagctgcgctggcaggagtaccgggagctggtgctgctgctgcttcagtggatgcgacaccacacggccgcctttgaggaacgcaggttcccctccagcttcgaggagattgagatcctgtggtctcagttcctgaagtttaaggagatggagctaccagccaaggaggccgacaagaacaggtccaagggcatctaccaatccctggagggagcggtgcaagcaggccagctcaaggtgccccctggctaccacccgctggatgtggagaaggagtggggcaagctgcacgtggccatcctggagcgggagaagcagctccgcagcgagtttgagaggctggagtgtcttcagcgcatcgtgaccaagctgcagatggaggcggggctgtgtgaggagcagctgaaccaggccgacgccctgctgcagtcggatgtccggctgctggctgcaggcaaagtgccacagcgggcgggggaggtggaacgggacttggacaaggcggatagcatgatccggctgctcttcaacgacgtgcagaccctcaaggatggacggcacccgcagggcgagcagatgtaccgcagggtgtaccgtctgcacgagcgcctggtagccatccgcaccgagtacaacctacggctgaaggcaggcgtggcggcccctgcaacccaggtggcccaggtgactctgcagagtgtgcagaggcgccccgagctggaggactccactctgcgctacctgcaggacctgctggcctgggtggaggagaaccagcaccgtgtggatggcgctgagtggggtgtggacctgcccagcgtggaggcgcagctgggcagccaccgaggcctgcaccagtccatcgaagaattccgggccaagatcgagcgggcacggagtgacgagggccagctctcccccgccacccggggtgcctaccgtgactgcctgggtcggctggacctgcagtacgccaagctgctgaactcctccaaggcccgcctcaggtccctggagagcttgcacagctttgtggcagccgccactaaggagctaatgtggctgaatgagaaggaggaggaggaggtgggcttcgactggagcgaccgcaacaccaacatgaccgccaagaaggagagctactcggcgctgatgcgggagctggagctgaaggagaagaagatcaaggagctccaaaatgctggggaccggctgctgcgggaggaccacccggcccggcccacggtggagtccttccaggcggccctgcagacgcagtggagctggatgctacagctgtgctgctgtatcgaggcacacctgaaggagaacgctgcctactttcagttcttctcagatgtgcgggaggccgaggggcagttgcagaagctgcaggaggcactgcgtaggaaatacagttgtgatcgctccgccaccgtcacccggctggaggacctgctgcaggatgcccaggacgagaaggaacagctgaacgagtacaagggccacctctcaggcctggccaagcgggccaaggccgtcgtgcagctgaagccccgccacccagcccaccccatgcggggccgcctgcccctgctggccgtgtgcgactataagcaggtggaggtgactgtgcacaagggtgacgagtgccagctggtgggccctgcacagccgtcccactggaaggtgctcagcagctccggcagcgaggccgccgtgccctccgtgtgcttcctggtgcccccgcccaaccaggaggcccaggaggccgtcaccaggctggaggcccagcaccaggccctggtcacgctgtggcaccagttgcacgtggacatgaagagccttctggcctggcagagccttcgccgcgacgtgcagctcatccgctcgtggtccctggccacgttccgcaccctgaagccagaggagcagcgccaagccctgcacagcctggagctgcactaccaggccttcctgcgggacagccaggacgcgggcggcttcggacccgaggaccggctgatggctgagcgcgagtacggctcctgcagccaccactaccagcagctgctgcagagcctggaacagggtgcacaggaagagtctcgctgccagcgctgcatctccgagctcaaagacatccggctgcagctggaggcctgtgagacgcgcaccgtgcaccgcctgcggctgccgctggacaaagagccggcacgggagtgtgcccagcgcatcgccgagcagcagaaggcacaggcagaggtggaggggctgggcaagggggtcgcccggctctctgccgaggccgagaaggtcttggccctaccagagccatcgcctgcggcccccacgctgcgctcggagctggagctgacgctgggcaagctggagcaggtccgcagcctgtctgccatctacctggagaagctcaagaccatcagcctggtgatccgcggcacgcagggggccgaggaggtgctcagggcccacgaggagcagctcaaggaggcccaggccgtgccggccaccctcccggagctcgaggccaccaaggcctctctgaagaagctgcgggcccaggccgaggcacagcagcccacgttcgacgccctgcgggatgagctgcggggggcacaggaggtgggggagcgactgcagcagcggcacggggagcgggacttggaggtggagcgctggcgggagcgggtcgcccaggtgcttgagcgctggcaggctgtgctggcccagaccgacttgcggcagcgcgagctcgagcaactgggccgccagctgcgttactaccgcgagagtgcagaccccttgggcgcctggctgcaggacgccaggcggcggcaggagcagatccaggccatgccgctggccgacagccaggctgtgcgggagcagctgcggcaggagcaggccctgctggaggagatcgagcgccacggcgagaaggtcgaggagtgccagaggtttgcgaaacagtacatcaacgccatcaaggactatgaactccagctggtgacgtacaaggcgcagcttgagccggtggcctccccggccaagaagcccaaggtccagtcgggatcagagagtgtcatccaggagtacgtggacctgcgtacgcactacagcgagctgaccacactgacgagccagtacatcaagttcatcagcgagactctgcggcgcatggaggaggaggagaggctggctgagcagcagcgggcagaggagcgcgagcggctggccgaggtggaggccgcgctggagaagcagcggcagctggccgaggcgcacgcccaggcaaaggcacaggcggagcgggaggcgaaggagctgcagcagcgcatgcaggaggaggtggtgcggcgggaggaggcggcggtggacgcgcagcagcagaagcgcagcattcaggaggagctgcagcagctgcggcagagctcggaggcggagatccaggccaaggcccggcaggcagaggcggctgagcgcagccggctgcgcatcgaggaggagatccgcgtggtgcgcctgcagttggaggccaccgagcgccagcgtggcggggctgagggggagctgcaggcactgcgtgcacgggcggaggaggctgaggcacaaaagcgacaggcgcaggaggaggccgagcgcttgcggaggcaggtgcaggacgagagccagcgtaagcggcaggcggaggtggagctggcctcgcgcgtgaaggccgagaccgaggcggcgcgcgagaagcagcgggccctgcaggccctggaggagctgcggctgcaggcggaggaggcggagcggcgcctgcggcaggccgaggtggagcgagcgcggcaggtacaggtggccctggagacggcgcagcgcagtgcagaggcggagctgcagagcaaacgcgcctccttcgccgagaagacggcacagctggagcgctccctgcaggaggaacacgtggctgtggcacagctgcgggaggaggctgagcggcgggcacagcagcaggccgaggccgagcgggcgcgcgaggaggcagagcgggagctggagcgctggcagctcaaggccaacgaggcgctacggctgcggctgcaggcggaggaggtggcgcagcagaagagcctggcgcaggccgaggctgagaagcagaaggaggaggcggagcgcgaggcgcggcggcgcggcaaggcggaggagcaggccgtccggcagcgggagctggctgaacaagagctggagaagcagcggcagctggcggaaggcaccgcgcagcagcgcctggccgcggagcaggagttgatccggctgcgggccgagacggagcagggggagcagcagcggcagctgctggaggaggagctggcccggctgcagcgtgaggcggctgcagccacgcagaaacggcaggagctggaagccgagctggccaaggtgcgggccgagatggaggtgctgctggccagcaaggcgagggctgaggaggagtcgcgctccaccagcgagaagtccaagcagaggctggaggccgaggccggccggttccgcgagctggccgaggaggccgcccgcctgcgtgccctggcggaagaggccaagcggcagcggcagctggccgaggaagacgcggcgcggcagcgggccgaggcggagcgggtgcttgcggagaagctggccgccatcggcgaggccacgcggctcaagacggaggcggagatcgcgctcaaggagaaggaggcggagaacgagcgcctgcggcggctggcggaggacgaggccttccagcggcggcggctggaggagcaggccgcgcaacacaaggctgacatcgaggagcgcctggcccagctgcgcaaggcatcggacagcgagctggagcggcagaaggggctggtggaggacacgctgaggcagcggcggcaggtggaggaagagatcctggcgctgaaggcgagcttcgagaaggcggccgctggcaaggcggagctggagctggagctgggacgcatccgcagcaacgcggaggacacgctgcgcagcaaggagcaggccgagctggaggccgcgaggcagcggcagctggcggcggaggaggagcggcggcgccgtgaggctgaggagcgcgtgcagaagagcctggcggccgaggaggaggccgcacggcagcggaaggcggcgctggaggaagtcgagcggctgaaagccaacgtggaggaggcgcggcgcctgcgggagcgagcggagcaggagtcggcgcggcagctgcagctggcccaggaggccgcccagaagcggctgcaggcggaagagaaggcacacgccttcgcggtgcagcagaaggagcaggagctacagcagacgctgcagcaggagcagagcgtgctggaccagctgcgcggcgaggcggaggcggcccggcgggcggctgaggaggcggaggaggcccgggtgcaggcggagcgtgaggcggcgcaggcccggcggcaggtggaagaggccgagcggctgaagcagtcggcagaggagcaggcacaggcccgggctcaggcacaggcggctgcagagaagctgcgcaaggaggccgagcaagaggcggcgcggcgggcacaggcggagcaggcggccctgcggcagaagcaggcagctgacgcggagatggagaagcataagaaattcgccgagcagacgctgcggcagaaggcgcaggtggagcaggagctgacaacactgcggctgcagctggaggagaccgaccaccagaagaacctgctggacgaggagctgcagcggctgaaggcggaggccacggaggccgcacgccagcgcagccaggtggaggaggagctcttctcggtgcgcgtgcagatggaggagctgagcaagctcaaggcacgcatcgaggctgagaaccgcgcactcatcttgcgtgacaaggacaatacgcagcgcttcctgcaggaggaggctgagaagatgaagcaggtggcggaggaggccgcgcggctgagtgtggcggcccaagaggctgcgcgactgcggcagctggcagaggaggacctggcacagcagcgggccttggcagagaagatgctcaaggagaagatgcaggcggtgcaggaggccacgcgactcaaggctgaggcggaactgctgcagcagcagaaggagcttgcgcaggagcaggcgcggcggctgcaggaggacaaggagcagatggcgcagcagctggcggaggagacgcagggcttccagcggacgctggaggccgagcggcagcggcagctggagatgagcgctgaggctgagcgcctcaagctgcgtgtggccgagatgagccgagcccaggcccgcgctgaggaggacgcccagcgcttccggaagcaggcggaggagatcggtgagaagctgcaccgcacggagctcgccacccaggagaaggtgaccctggtgcagacactggagatccagcgacagcagagtgaccatgatgccgagcgcctgcgggaggccatcgctgagctggagcgtgagaaggagaagctccaacaggaggccaaactgctgcagctcaagtctgaggagatgcagacggtgcagcaggagcagctgctgcaggagacgcaggccctgcagcaaagcttcctctctgaaaaggacagcctgctacagcgggagcgcttcatcgagcaggagaaggccaagctggagcagctcttccaggacgaggtggccaaggcacagcagctgcgtgaggagcagcagcggcagcagcagcagatggagcaggaacggcagcggctggtggccagcatggaggaggcgcggcggcggcagcatgaggccgaggagggcgtgcggcgcaagcaggaggagctgcagcagctggagcagcagcggcggcagcaggaggagctgctggctgaggagaaccagaggctgcgtgagcagctgcagctcctggaggagcagcaccgggccgcgctggcgcactcagaggaggtcactgcctcgcaggtggctgccacaaagaccctgcccaatggccgggatgcacttgatggccccgcggcagaggcagagccggagcacagcttcgatggcctgcggcggaaggtgtcagctcagaggctgcaggaggccggcatcctgagtgcggaggagctgcagcggttggcgcagggccacaccacggtggacgagctcgcacggcgggaagacgtgcgccactacctgcagggccgcagcagtatcgcagggctgttgctgaaggccaccaatgagaagctgagtgtttacgccgccctgcagaggcagctgctgagtcccggcacggccctcatcctgctggaggcgcaggcggcctcaggcttcctgctggaccctgtgcggaaccggcggctgaccgtcaacgaggctgtgaaggagggtgtggtgggccccgagctgcaccacaagctgctgtcggccgagcgcgccgtcactggctacaaggacccctacactggccagcagatctctctcttccaagccatgcagaagggcctcatcgtccgggagcacggcatccgcctgctggaggcccagatcgccacgggcggcgttatcgaccccgtgcacagccaccgcgtgcccgtggacgtggcctaccggcgcggctacttcgacgaggagatgaaccgcgtcctggcggaccccagcgacgacaccaagggcttctttgaccccaacacgcacgagaacctcacgtacctgcagctactggagcgctgcgtggaggaccccgagacgggcctgtgccttctgccactcacggataaggctgccgagggcggggagctggtctacactgactccgaggcccgggacgtctttgagaaggccaccgtgtctgcgccgttcggcaagttccagggcaagacggtgaccatttgggagatcatcaactcggaatacttcacggcagagcagcggcgggacctgctgcggcagttccgcacgggccggatcacagtggagaagatcatcaagatcatcatcacggtggtggaggagcaggagcagaagggccggctttgctttgagggcctgcgcagcctggtgccagccgccgagctgctggagagcagggtcatcgaccgcgagctctaccagcagctgcagcgaggtgagcgctctgtgcgagacgtagccgaggtggacactgtgcggcgggctctccggggtgccaacgtcatcgcgggtgtatggctggaggaggcggggcagaagctgagtatctacaatgccctgaagaaagacctgctgccatccgacatggccgtggccctgttggaagcccaggccggcaccgggcacatcatcgaccccgccaccagcgcccggctgaccgtggacgaggcagtgcgtgctggcctggtgggccccgagtttcatgagaagctgctatcagccgagaaggctgtgacagggtacagggacccctacacagggcagagcgtctccctgttccaggccctgaagaagggcctcattccccgggagcagggcctgcgcctgttggacgcccagctgtccacgggcggcatcgtggaccccagcaagagccaccgcgtgcccctggatgtcgcctgcgcccgaggctgcctggatgaggagaccagcagggccctgtcggcaccaagggccgacgccaaggcctacagtgaccccagcacaggggagccggccacctacggcgagctccagcagcggtgccggcccgaccagctgaccgggctgagcctgctgccgctctcagaaaaggctgctcgggcccggcaggaggagctctactcagagctgcaggcccgtgagacctttgaaaagaccccggttgaggtccccgtgggtggcttcaagggcaggacggtgacggtgtgggagctcatcagctctgagtacttcactgcggagcagcggcaggagctgttgcgtcagttccgcacgggcaaggtcaccgtggagaaggtcatcaagattctcattaccatcgtggaggaggtggagaccctgcggcaggagaggctgtccttcagcggcctccgtgcccctgtgccagccagcgagctcctggcttccggggtcctcagcagagcccagtttgagcagctcaaggacggcaagacgacggtcaaggacctttcggagctgggctccgtgcggacgctgctgcagggcagtggctgcctcgccggcatctacctggaggacaccaaggagaaggtgtccatctacgaggccatgcgccggggcctgctgagagccacaacggctgcgctcctgctggaggcgcaggcggccactggcttcctggtggaccccgtgcggaaccagcgcctgtatgtccacgaggccgtgaaggcgggcgtggtgggccccgagcttcacgagcagctgctgtctgccgagaaggccgtcaccggctacagagacccctactcgggcagcaccatctccctcttccaggccatgcagaagggcctggttctccggcagcacggcatccgcctgctggaggcccagatcgccacgggcggcatcatcgaccccgtgcacagccaccgcgtgcctgtggacgtggcctaccagcgcggctacttcagtgaggagatgaaccgcgtcctggcggaccccagcgacgacaccaagggcttctttgaccccaacacgcatgagaacctcacgtacaggcagctgctggagcggtgcgtggaggaccccgagacgggcttgcgccttctgccactgaaaggggcggagaaggctgaggtggtggagaccacgcaggtgtacactgaggaggagacaagaagggcatttgaagagacacagatcgacattcccggcggcggcagccacggcggctccaccatgtccctgtgggaggtgatgcagtcggacctgatccccgaggagcagcgggcccagctgatggctgacttccaggccggccgggtgaccaaggaacgcatgatcatcatcatcatcgagatcattgagaagacagagatcatccgccagcagggtctggcctcctatgactacgtgcgccgccgcctcacggctgaggacctgttcgaggctcggatcatctctctcgagacctacaacctgctccgggagggcaccaggagcctccgtgaggctctcgaggcggagtccgcctggtgctacctctatggcacgggctccgtggctggtgtctacctgcccggttccaggcagacactgagcatctaccaggctctcaagaaagggctgctgagtgccgaggtggcccgcctgctgctggaggcacaggcagccacaggcttcctgctggacccggtgaagggggagcggctgactgtggatgaggctgtgcggaagggcctcgtggggcccgagctgcacgaccgcctgctctcggctgagcgggcggtcaccggctaccgtgacccctacaccgagcagaccatctcgctcttccaggccatgaagaaggagctgatccctactgaggaggccctgcggctgctggatgcccagctggccaccggcggcatcgtggacccccgcctgggcttccaccttcccctggaggtggcttaccagcgtggctacctcaacaaggacacgcacgaccagctgtcagagcccagcgaggtgcgcagctacgtggacccgtccaccgacgagcgcctcagctacacgcagctgctcaggcggtgccgtcgtgacgacggcaccggccagctgctcctgccactgtcggacgcccgcaagctgaccttccgtggcctgcggaagcagatcaccatggaggagctggtgcgctcgcaggtcatggacgaggccacggcgctgcagctgcgggagggcctgacctccatcgaggaggtcaccaagaacttgcagaagttcctggaaggcaccagctgcatcgctggtgtcttcgtggacgccaccaaggaacggctctcggtgtaccaggccatgaagaaaggcatcatccgccccggcacagcctttgagctcctggaggcgcaggcggccaccggttacgtcatcgaccccatcaagggactgaagctgacggtggaggaggctgtgcgtatgggcattgtgggccccgagttcaaggacaagctgctgtcggccgagcgcgccgtcactgggtacaaggacccctactctgggaagctcatctccctcttccaggccatgaagaagggcctgatcctgaaggaccatggcatccgcctgctggaggcccagatcgccacgggcggcatcatcgaccctgaggagagccaccggctgcccgtggaggtggcctacaagcgcggcctcttcgatgaggagatgaacgagatcctgaccgacccctcggacgacaccaagggcttctttgaccctaacacggaggagaacctcacctacctgcagctgatggagcgttgtatcactgacccccagacgggcctgtgtctcttgccgctgaaggagaagaagcgggagcggaagacgtcctccaagtcctccgtgcgcaagcgccgagtggtcatcgtggaccccgagacgggcaaggagatgtcagtgtacgaggcctaccgcaagggcctgattgaccaccagacgtacctggagctgtccgagcaggagtgcgagtgggaggagatcaccatctcctcctcggacggcgtggtcaagtccatgatcatcgaccgccgctccgggcgccagtacgacatcgatgatgccatcgccaagaacctcatcgaccgctcggcactggaccagtaccgcgccggcacgctctccatcaccgagttcgccgacatgctctcgggcaacgccggtggtttccgctcccgttcctcctcggtgggatcctcctcctcctaccccatcagccccgccgtctccaggacccagctggcctcctggtcagaccccactgaggagacgggccccgtggctggcatcctggacacggagacgctggagaaggtgtccatcaccgaggccatgcaccggaacctggtggataacatcacggggcagcggctgctggaggcgcaggcctgcaccgggggcatcatcgaccccagcaccggtgagcgcttccctgtcaccgacgccgtcaacaagggcctggtggacaagatcatggtggaccgcatcaacctggcccagaaggccttttgcggcttcgaggacccacgcaccaagaccaagatgtcggccgcccaggccctgaagaagggctggctctactacgaggccggccagcgcttcctggaggtgcagtacctgaccggcggcttgatcgagcccgacacgccgggccgcgtgcccctggacgaggccctgcagcgcggcacggtggacgcccgcaccgcacagaagctgcgtgacgtgggcgcctactccaagtacctcacctgccctaagaccaagctcaagatctcctataaggacgcgctggaccgcagcatggtggaggagggcacggggctgcggctgctggaggctgccgcgcagtccaccaagggctactacagcccctacagcgtcagcggctccggctctaccgctggctcccgcaccggctcgcgcaccggctcccgggccggctcccgccgcggcagctttgacgccaccggctccggcttctccatgaccttctcttcatcctcctactcctcctcgggctacggccgccgctacgcctcggggtcctcggcctccctggggggccctgagtctgccgtggcctgaggctgcctgcgcccaccccgctctgcatgcggcccagcccggctcccaccgaggcgcgggggccgttttcaacgcttaaaggtgtcttcctcccaagtggtgcctaaagtttaaccaaaaagaccagactaatatattaatatatatctgctgtccagacagcctgtatcttgggggacagggctggcccagccctgctggccgcctcaccccctcgggtctcctcactcccttctacctgccactcacacagccaggtgccttggagggtcccaagctgggccccagcccaccctcctgtcttcccagggtagcccgcctgccagtcctagctgcacagggcagctgggcccaaccctgtctgtagagggccctggtgtttctagcactggcctgcacggtgggccttgctggggacggggggccccagtcagcctctctcccagtctacccagagaagccccttccccatgggaagacgaggccctcgggcccagcccccacagtgctgtctgatctgtgctttccagctcaccccccacactcactcctgagacccctggcctccggcgtcagcctccagcctctgttcccctagtaagtgccttccatgtcggcctctaaccccaggccccgaggacccagacccagtggggaggcggacgttccagccggcatggctgggaactgcagacctgtcctcctggtgggtccaggggcccctccagcttgtggagccccacactggggtgccgcctgcccgtctctctcccatggagccccagccccctttgggcccagggacaccagccaggctctgtgctgaccctcctgttgcgcccagccctggtctcagcagcgaccacccctgcctccaccctctgagctttgcatgttccactaaccccgggcgggtggcaggtggaggtgtcaggctgctggcgcctctgcaagggcagaacactaacctgaccgtgggcggggccttgcggtatccgcccccaataaaagcaattccaacctt

SEQ ID NO: 4629 - DNA, 3388 bp, Homo sapiens; identical to SEQ ID NO: 85

SEQ ID NO: 4630 - DNA, 2834 bp, Homo sapiens; identical to SEQ ID NO: 311

SEQ ID NO: 4631 - DNA, 1599 bp, Homo sapiens; identical to SEQ ID NO: 1010

SEQ ID NO: 4632 - DNA, 655 bp, Homo sapiens; identical to SEQ ID NO: 139

SEQ ID NO: 4633 - DNA, 3128 bp, Homo sapiens; identical to SEQ ID NO: 2063

SEQ ID NO: 4634 - DNA, 5938 bp, Homo sapiens
tttccaggcactctcattcatagagccagcgggcgcgggcgggacgggcgccccgcggccggacccagccagggcaccacgctgcccggccctgcgccgccaggcacttctttccggggctcctagggacgccagaaggaagtcaacctctgctgcttctccttggcctgcgttggaccttcctttttttgttgtttttttttgtttttcccctttcttccttttgaattaactggcttcttggctggatgttttcaacttctttcctggctgcgaactttttccccaattgttttccttttacaacagggggagaaagtgctctgtggtccgaggcgagccgtgaagttgcgtgtgcgtggcagtgtgcgtggcaggatgtgcgtgcgtgtgtaacccgagccgcccgatctgtttcgatctgcgccgcggagccctccctcaaggcccgctccacctgcttggcggttacgcggcgctcgtgggtgttcgtgccttcggagcagctaaccggcgggtgctgggcgacggtggaggagtatcgttctcgctgcttgcccgagtcagggctgagtcaccccagctgatgtagacagtggctgccttccgaagagtgcgtgtttgcatgtgtgtgactctgcggctgctcaactcccaacaaaccagaggaccagccacaaacttaaccaacatccccaaacccgagttcacagatgtgggagagctgtagaaccctgagtgtcatcgactgggccttcttatgattgttgttttaagattagctgaagatctctgaaacgctgaattttctgcactgagcgtttgacagaattcattgagagaacagagaacatgacaagtacttctagctcagcactgctccaactactgaagctgattttcaaggctacttaaaaaaatctgcagcgtacattaatggatttctgttgtgtttaaattctccacagattgtattgtaaatattttatgaagtagagcatatgtatatatttatatatacgtgcacatacattagtagcactacctttggaagtctcagctcttgcttttcgggactgaagccagttttgcatgataaaagtggccttgttacgggagataattgtgttctgttgggactttagacaaaactcacctgcaaaaaactgacaggcattaactactggaacttccaaataatgtgtttgctgatcgttttactcttcgcataaatattttaggaagtgtatgagaattttgccttcaggaacttttctaacagccaaagacagaacttaacctctgcaagcaagattcgtggaagatagtctccactttttaatgcactaagcaatcggttgctaggagcccatcctgggtcagaggccgatccgcagaaccagaacgttttcccctcctggactgttagtaacttagtctccctcctcccctaaccacccccgcccccccccaccccccgcagtaataaaggcccctgaacgtgtatgttggtctcccgggagctgcttgctgaagatccgcgcccctgtcgccgtctggtaggagctgtttgcagggtcctaactcaatcggcttgttgtgatgcgtatccccgtagatgccagcacgagccgccgcttcacgccgccttccaccgcgctgagcccaggcaagatgagcgaggcgttgccgctgggcgccccggacgccggcgctgccctggccggcaagctgaggagcggcgaccgcagcatggtggaggtgctggccgaccacccgggcgagctggtgcgcaccgacagccccaacttcctctgctccgtgctgcctacgcactggcgctgcaacaagaccctgcccatcgctttcaaggtggtggccctaggggatgttccagatggcactctggtcactgtgatggctggcaatgatgaaaactactcggctgagctgagaaatgctaccgcagccatgaagaaccaggttgcaagatttaatgacctcaggtttgtcggtcgaagtggaagagggaaaagcttcactctgaccatcactgtcttcacaaacccaccgcaagtcgccacctaccacagagccatcaaaatcacagtggatgggccccgagaacctcgaaataatgagtgtgtatatggcaactaccctgaaatacctttggaagaaatgccagatgcagatggagtagccagcactccctccctcaatattcaagagccatgctctcctgccacatccagtgaagcattcactccaaaggagggttctccttacaaagcccccatctacatccctgatgatatccccattcctgctgagtttgaacttcgagagtcaaatatgcctggggcaggactaggaatatggaccaaaaggaagatcgaagtaggtgaaaagtttgggccttatgtgggagagcagaggtcaaacctgaaagaccccagttatggatgggagatcttagacgaattttacaatgtgaagttctgcatagatgccagtcaaccagatgttggaagctggctcaagtacattagattcgctggctgttatgatcagcacaaccttgttgcatgccagataaatgatcagatattctatagagtagttgcagacattgcgccgggagaggagcttctgctgttcatgaagagcgaagactatccccatgaaactatggcgccggatatccacgaagaacggcaatatcgctgcgaagactgtgaccagctctttgaatctaaggctgaactagcagatcaccaaaagtttccatgcagtactcctcactcagcattttcaatggttgaagaggactttcagcaaaaactcgaaagcgagaatgatctccaagagatacacacgatccaggagtgtaaggaatgtgaccaagtttttcctgatttgcaaagcctggagaaacacatgctgtcacatactgaagagagggaatacaagtgtgatcagtgtcccaaggcatttaactggaagtccaatttaattcgccaccagatgtcacatgacagtggaaagcactatgaatgtgaaaactgtgccaaggttttcacggaccctagcaaccttcagcggcacattcgctctcagcatgtcggtgcccgggcccatgcatgcccggagtgtggcaaaacgtttgccacttcgtcgggcctcaaacaacacaagcacatccacagcagtgtgaagccctttatctgtgaggtctgccataaatcctatactcagttttcaaacctttgccgtcataagcgcatgcatgctgattgcagaacccaaatcaagtgcaaagactgtggacaaatgttcagcactacgtcttccttaaataaacacaggaggttttgtgagggcaagaaccattttgcggcaggtggattttttggccaaggcatttcacttcctggaaccccagctatggataaaacgtccatggttaatatgagtcatgccaacccgggccttgctgactattttggcgccaataggcatcctgctggtcttacctttccaacagctcctggattttcttttagcttccctggtctgtttccttccggcttgtaccacaggcctcctttgatacctgctagttctcctgttaaaggactatcaagtactgaacagacaaacaaaagtcaaagtcccctcatgacacatcctcagatactgccagctacacaggatattttgaaggcactatctaaacacccatctgtaggggacaataagccagtggagctccagcccgagaggtcctctgaagagaggccctttgagaaaatcagtgaccagtcagagagtagtgaccttgatgatgtcagtacaccaagtggcagtgacctggaaacaacctcgggctctgatctggaaagtgacattgaaagtgataaagagaaatttaaagaaaatggtaaaatgttcaaagacaaagtaagccctcttcagaatctggcttcaataaataataagaaagaatacagcaatcattccattttctcaccatctttagaggagcagactgcggtgtcaggagctgtgaatgattctataaaggctattgcttctattgctgaaaaatactttggttcaacaggactggtggggctgcaagacaaaaaagttggagctttaccttacccttccatgtttcccctcccattttttccagcattctctcaatcaatgtacccatttcctgatagagacttgagatcgttacctttgaaaatggaaccccaatcaccaggtgaagtaaagaaactgcagaagggcagctctgagtccccctttgatctcaccactaagcgaaaggatgagaagcccttgactccagtcccctccaagcctccagtgacacctgccacaagccaagaccagcccctggatctaagtatgggcagtaggagtagagccagtgggacaaagctgactgagcctcgaaaaaaccacgtgtttgggggaaaaaaaggaagcaacgtcgaatcaagacctgcttcagatggttccttgcagcatgcaagacccactcctttctttatggaccctatttacagagtagagaaaagaaaactaactgacccacttgaagctttaaaagagaaatacttgaggccttctccaggattcttgtttcacccacaaatgtcagctattgaaaacatggcagaaaagctagagagcttcagtgccctgaaacctgaggccagtgagctcttacagtcagtgccctctatgttcaacttcagggcgcctcccaatgccctgccagagaaccttctgcggaagggaaaggagcgctatacctgcagatactgtggcaagatttttccaaggtctgcaaacctaacacggcacttgagaacccacacaggagagcagccttacagatgcaaatactgtgacagatcatttagcatatcttctaacttgcaaaggcatgttcgcaacatccacaataaagagaagccatttaagtgtcacttatgtgataggtgttttggtcaacaaaccaatttagacagacacctaaagaaacatgagaatgggaacatgtccggtacagcaacatcgtcgcctcattctgaactggaaagtacaggtgcgattctggatgacaaagaagatgcttacttcacagaaattcgaaatttcattgggaacagcaaccatggcagccaatctcccaggaatgtggaggagagaatgaatggcagtcattttaaagatgaaaaggctttggtgaccagtcaaaattcagacttgctggatgatgaagaagttgaagatgaggtgttgttagatgaggaggatgaagacaatgatattactggaaaaacaggaaaggaaccagtgacaagtaatttacatgaaggaaaccctgaggatgactatgaagaaaccagtgccctggagatgagttgcaagacatccccagtgaggtataaagaggaagaatataaaagtggactttctgctctagatcatataaggcacttcacagatagcctcaaaatgaggaaaatggaagataatcaatattctgaagctgagctgtcttcttttagtacttcccatgtgccagaggaacttaagcagccgttacacagaaagtccaaatcgcaggcatatgctatgatgctgtcactgtctgacaaggagtccctccattctacatcccacagttcttccaacgtgtggcacagtatggccagggctgcggcggaatccagtgctatccagtccataagccacgtatgacgttatcaaggttgaccagagtgggaccaagtccaacagtagcatggctctttcatataggactatttacaagactgctgagcagaatgccttataaacctgcagggtcactcatctaaagtctagtgaccttaaactgaatgattta

SEQ ID NO: 4635 - DNA, 224 bp, Homo sapiens
agaatgttctgaagcagaacgagactctgatcgctgtctttttttctttgaatggctatcatcatcatctgaatctgaccccgatcgagagcgggaacgtttcctatgatgttttttagatttcttagaatgtttcttgttctttgaatgatgatgctgacattcatgctcaagcacatgcataaaatctttaaatatttcggttttctttcagattctagagt

SEQ ID NO: 4636 - DNA, 476 bp, Homo sapiens
  misc_feature (1)..(476): n=a,t,g or c
tcgtnncntcggttctgagaaataggcactggcaatttacacatgccttgctgtgtaatctcactatatttgctcaggcaaagtgggagaagcagccttaggttttcattctagagatgccggctttcccacctgatcggcttagagttcacgattgactgttttgggcttcatttcaccctctacataacaagcgggtggactagatgccttagcaagggtccgtgttgtgtggtgtctccagccacgcactcagctcaatcttagcacagttaaaaaatgcctttctagcaagttatctgcccagtgcctgaaaaagtatcatttcttgtgttcaataaaaaagcctcctaatttaatcaaggacctatggagataactgtcttttagttgtggcattgcaaggatacaaatgcagagatattttaaaagtgatccttctgtaagagtgaacccacgatatgatctggnagcaa

SEQ ID NO: 4637 - DNA, 191 bp, Homo sapiens
aaaaccatagctttataaatcagtggaaagtggcttacagagagacctatcagatgtgtttacatcacatcttattcactttttttaacagctctaatgctttggcattgctatgttcatattcatgtattccctatttatagctctgatagcttaactctcctagcagtctgtctatcagatgtgcacat

SEQ ID NO: 4638 - DNA, 355 bp, Homo sapiens
gccgtccacgccgctcttgacagtccgaggatcagaaggactgtacatggtgaatggaccaccacattttacagaaagcacagtgtttccaagggaatctgggaagaattgcaaagtctgtatctttagtaagggatgggaccctgttttgacctgggcaatggagaaaagtaaatattatcagtgtcactaccaagggactactgcactccttcgacctcctgaaggcagtttgccttgaattctcacccaaaaatactgtcctggcaacgtggcagccttacactacttctaaagatggcacacctggtatacccaacctacacctttatgatgtgaaactggggacatgttt

SEQ ID NO: 4639 - DNA, 294 bp, Homo sapiens
gtactttgtgggagccagttcacctcctttcctaaaattcagtgtgatcaccctgttaatggccacactagctctgaaattaatttccaaaatctttgtagtagttcatacccactcagagttataatggcaaacaaacagaaagcattagtacaagcccctcccaacacccttaatttgaatctgaacatgttaaaatttgaggaataaagagacatttttcaatctctttgtctggtttgtcccttgtgcttatggggactccttaatggcatttccagcctgttgctgagg

SEQ ID NO: 4640 - DNA, 472 bp, Homo sapiens; identical to SEQ ID NO: 3575

SEQ ID NO: 4641 - DNA, 142 bp, Homo sapiens; identical to SEQ ID NO: 373

SEQ ID NO: 4642 - DNA, 335 bp, Homo sapiens; identical to SEQ ID NO: 3984

SEQ ID NO: 4643 - DNA, 529 bp, Homo sapiens
  misc_feature (1)..(529): n=a,t,g or c
gggcggccgntagctgttgctgttgggggaccgctcattcctgccgctgccgtccctgctgcctcatgcggccatcggagttcacctgggctgcacctcagcatgtgaggccgtctataaggatggccgggctggtgtggttgcaaatgatgccggtgaccgagttactccagctgttgttgcttactcagaaaatgaagagattgttggattggcagcaaaacaaagtagaataagaaatatttcaaatacagtaatgaaagtaaagcagatcctgggcagaagctccagtgatccacaagctcagaaatacatcgcggaaagtaaatgtttagtcattgaaaaaaatgggaaattacgatatgaaatagatactggagaagaaacaaaatttgttaacccagaagatgttgccagactgatatttagtaaaatgaaagaaacggcacattctgtattgggctcagatgcaaatgatgtagttattactgtcccgtttgattttggagaaaagccaaaaatgcccttg

SEQ ID NO: 4644 - DNA, 427 bp, Homo sapiens; identical to SEQ ID NO: 3986

SEQ ID NO: 4645 - DNA, 377 bp, Homo sapiens
ttttttttgttttttagtaaactttattgtaccgaacaaaaaaaatgattttgcaatgattttctctcccacaaaagcgtgggtgaaaaccagtaacttataaaaatactttcggactctaataatacatacattcacaccttatcttctgagtatttaaatgggggaggttcacctgaaaaaacccatagttttttgcctcaactgacctgtaaaaaagtccacctatatcaactttctgccaatctggagaagatctgttttctttgatctgacgtcatgtgttcacaagcttctaaaatgtttgccaaaattaaagtctgctggatggtttttgccttaacccatattcttccattcattccaaatactatctc

SEQ ID NO: 4646 - DNA, 271 bp, Homo sapiens
caaagtgttaaaaatgctgaagtcatgtcaagtactgtctggagggtttttttaagaaaaggcatttggcatttaactgtctcttgttttatttttaagtttttggaaaccttttgacataaaatgctgccaagtatctaagaaatgtatatactgacagaagatatttgaaagtggaaaattggaaatgaaatatgttgctgggtgcgttaatcacctccgcccaggatttagtcacttgcaggacctctttatagtctaggatggcaga

SEQ ID NO: 4647 - DNA, 1253 bp, Homo sapiens; identical to SEQ ID NO: 3067

SEQ ID NO: 4648 - DNA, 3088 bp, Homo sapiens; identical to SEQ ID NO: 3072

SEQ ID NO: 4649 - DNA, 484 bp, Homo sapiens
  misc_feature (1)..(484): n=a,t,g or c
cttactagaccagaaaagaacttattccagataagctttgaatatcaattcttacataaactttaggcaaacagggaatagtctagtcaccaaaggaccattctcttgccaatgctgcattccttttgcacttttggattccatatttatcccaaatgctgttgggcacccctagaaataccttgatgttttttctatttatatgcctgcctttggtacttaattttacaaatgctgtaatataaagcatatcaagtttatgtgatacgtatcattgcaagagaatttgtttcaagatttttttttaatgttccagaagatggccaatagaggaacattcaaggggaaatgggggaaacataatttaggaggaacaaggaacaaaccatgttctncaaatttttttttaaaaaaaattaatgggtttaaaatatatggntttggggacgttcctggcccggggtaaccaagggactgtggattt

SEQ ID NO: 4650 - DNA, 462 bp, Homo sapiens
  misc_feature (1)..(462): n=a,t,g or c
ttcggcacaggcaatgcaggtttttgtacttaattatatggtgatttttttactttttaagagcagaaacggaaattgacctccccgccatgtgtttaatattcctcctgcttttacttttgtcattttcttgataatcgtaagccttgagagtgtttgtgaaaaagttttatttcctgttatgtatacataattaaatgaaaattcttcagaaaaagtttgataaattgaattgtggttatgaaactaatttgcatttttatttgcttaagaaagaaagctgtgatagattccagatatgctttttgatgttttcctctgctccagctccaaggaagtcaggcacacctggcattttaggctctgcatgcagccccagcagggcgcggtggtttaaggaatttccattgtttaacngggcngggtgtgaggaagtcttcccttaggcttgggtgggagggg

SEQ ID NO: 4651 - DNA, 1887 bp, Homo sapiens
ccgtttttgttcttctaagcaaaagatctccctctctctagccgatgctccccactcagttcatcccgggaatgggccagggaggaaggttctcatgcatcgccccgagctgccaggcgagcttcgggctccttaaattcacaggccaacagcccgcgtcctctccgcgcaggctcccggttgcccgcggtccccggcccagctccttggcctcctcctcgtcggtccgcccctggtggtcttggcgcccgctcgtccagctcggcgcgccggggaccgccggctgcccggggcagtccgcacgccctcggggatctcggctcccggatccgccgcgccggcaggagccggccgggcctggagggagcaagcggatgcgcccacgcccccggcacggggatggcgcgacagggcccgggctccggggtggggctcggcagagctcctgacagctccggggctcggcagcgcgggaggggggagctccgccgctcgccgctcattcccggctcggggctcccctccactcgctcgggcggcgcggggcccgttcgggccgcccgtcgccgcccccgccccccgcgcgcccgcccgccagcccgcctgcgccctcgctcgccccgcgcgcgttcctagggcgccacctctttgcgactagctcacttctccggcaggtttgcctcggagcgtgtgaacattcctccgctcggttttcaactcgcctccaacctgcgccgcccggccagcatgtctccccgcccgtgaagcgggctgccgcctccctgccgctccggctgccactaacgacccgccctcgccgccacctggccctcctgatcgacgacacacgcacttgaaacttgttctcagggtgtgtggaatcaactttccggaagcaaccagcccaccagaggaggtcccgagcgcgagcggagacgatgcagcggagactggttcagcagtggagcgtcgcggtgttcctgctgagctacgcggtgccctcctgcgggcgctcggtggagggtctcagccgccgcctcaaaagagctgtgtctgaacatcagctcctccatgacaaggggaagtccatccaagatttacggcgacgattcttccttcaccatctgatcgcagaaatccacacagctgaaatccaccccgtccgatttgggtctgatgatgagggcagatacctaactcaggaaactaacaaggtggagacgtacaaagagcagccgctcaagacacctgggaagaaaaagaaaggcaagcccgggaaacgcaaggagcaggaaaagaaaaaacggcgaactcgctctgcctggttagactctggagtgactgggagtgggctagaaggggaccacctgtctgacacctccacaacgtcgctggagctcgattcacggaggcattgaaattttcagcagagaccttccaaggacatattgcaggattctgtaatagtgaacatatggaaagtattagaaatatttattgtctgtaaatactgtaaatgcattggaataaaactgtctcccccattgctctatgaaactgcacattggtcattgtgaatatttttttttttgccaaggctaatccaattattattatcacatttaccataatttattttgtccattgatgtatttattttgtaaatgtatcttggtgctgctgaatttctatattttttgtaacataatgcactttagatatacatatcaagtatgttgataaatgacacaatgaagtgtctctattttgtggttgattttaatgaatgcctaaatataattatccaaattgattttcctttgtgcatgtaaaaataacagtattttaaatttgtaaagaatgtctaataaaatataatctaattac

SEQ ID NO: 4652 - DNA, 1595 bp, Homo sapiens; identical to SEQ ID NO: 1682

SEQ ID NO: 4653 - DNA, 214 bp, Homo sapiens; identical to SEQ ID NO: 3585

SEQ ID NO: 4654 - DNA, 415 bp, Homo sapiens
  misc_feature (1)..(415): n=a,t,g or c
tcatgctagtatatgacatcaccaatggtaaaagttttgaaaacatcagcaaatggcttagaaacatagatgagcatgccaatgaagatgtggaaagaatgttactaggaaacaagtgtgatatggacgacaaaagagttgtacctaaaggaaaaggagaacagattgcaagggagcatggtattaggttttttgagactagtgcaaaagcaaatattaaacatcggaaaagggcgttcctcacgttagctggaaggatatccttcggaaagacccctgttaaaggagccccaacagtggaaantgttaggntttcagcagtgggagggagggcgttgacaggctggggaggagccaatgcttgctggagcnttctcctgtttcccttcagtttgcccntcccacttacccccnt

SEQ ID NO: 4655 - DNA, 480 bp, Homo sapiens
  misc_feature (1)..(480): n=a,t,g or c
tgcctctagtgcttgctgttttgcataaatatactctagcttcttcaggaccacttcttctgtcttacctgaaagagacgatactttccgtatcagaatattccgttttcgagtcaggagatttttctgtcctatcaatttgtctgcctgatctgttagtccctgaatttcactgaaggctcgagtaagaatgagacttttggaaaccttggaagaatgaagtaatcccaatgtgatctttaatttctcaaagagatccctcatttcaccacgccgccgccgctcattgggcagtgtgtgtccggcgataataagcaaacgcttctccttctttctgtagtttgtcactccagtaatcagggnttcagttttagagggattgggtgggagccttttcgactcctttcagctggnttttcatctgcagagangtgagtacaggagggtgtttgaagaccgtgtgtggggccntgtggtctt

SEQ ID NO: 4656 - DNA, 317 bp, Homo sapiens
gtaatgtggtccacagccatgcccttgaggagctggccactggatactgaacacccctactccattctgcttatgaatcccatttgcctattgaccctgcagttagcatgctgtcaccctgaatcataatcgctcctttgcacctctaaaaagatgcccttaccctcattctggagggctcctgagcctctgcgtaaggctgaacgtctcactgactgagctagtcttcttgttgctcgggtgcatttgaggatggatttggggagggatcaagtgaaccatccctagtcttccctcaataaataacttttaactcc

SEQ ID NO: 4657 - DNA, 2283 bp, Homo sapiens; identical to SEQ ID NO: 3587
  misc_feature (1)..(2283): n=a,t,g or c

SEQ ID NO: 4658 - DNA, 2863 bp, Homo sapiens
cctggcgaaagcaagacgtggaggttttaccaggggttagtagcttcctcttgctaactttttattgggacaaaaggcaagatggcaccattctgttctcagatatttgtctaaataaagcccttttaattttattttatttttgttgtgggattcttaagcagataagaagaaaagacaccttcctagtgagcagctgcccagctcctgctcagttttgcctcggggtagcacctccagccacagaaagcaagccggtaagtctctccaggtaggacttgctgcaacccagctgctggactgatctgaaacgggactttgcatactctccgaagtatggtgagttggtgctgacttcaaagttgcctggtgaaggaagataaggtggatcgcagagactaaggggagagggagaagccctgctcctcttctccccaccaaggcacaatgagcaacatctgtcagaggctctgggagtacctagaaccctatctcccctgtttgtccacggaggcagacaagtcaaccgtgattgaaaatccaggggccctttgctctccccagtcacagaggcatggccactactttgtggctttgtttgattaccaggctcggactgctgaggacttgagcttccgagcaggtgacaaacttcaagttctggacactttgcatgagggctggtggtttgccagacacttggagaaaagacgagatggctccagtcagcaactacaaggctatattccttctaactacgtggctgaggacagaagcctacaggcagagccgtggttctttggagcaatcggaagatcagatgcagagaaacaactattatattcagaaaacaagaccggttcctttctaatcagagaaagtgaaagccaaaaaggagaattctctctttcagttttagatggagcagttgtaaaacactacagaattaaaagactggatgaagggggattttttctcacgcgaagaagaatcttttcaacactgaacgaatttgtgagccactacaccaagacaagtgacggcctgtgtgtcaagctggggaaaccatgcttaaagatccaggtcccagctccatttgatttgtcgtataaaaccgtggaccaatgggagatagaccgcaactccatacagcttctgaagcgattgggatctggtcagtttggcgaagtatgggaaggtctgtggaacaataccactccagtagcagtgaaaacattaaaaccaggttcaatggatccaaatgacttcctgagggaggcacagataatgaagaacctaagacatccaaagcttatccagctttatgctgtttgcactttagaagatccaatttatattattacagagttgatgagacatggaagtctgcaagaatatctccaaaatgacactggatcaaaaatccatctgactcaacaggtagacatggcggcacaggttgcctctggaatggcctatctggagtctcggaactacattcacagagatctggctgccagaaatgtcctcgttggtgaacataatatctacaaagtagcagattttggacttgccagagtttttaaggtagataatgaagacatctatgaatctagacacgaaataaagctgccggtgaagtggactgcgcccgaagccattcgtagtaataaattcagcattaagtccgatgtatggtcatttggaatccttctttatgaaatcattacttatggcaaaatgccttacagtggtatgacaggtgcccaggtaatccagatgttggctcaaaactatagacttccgcaaccatccaactgtccacagcaattttacaacatcatgttggagtgctggaatgcagagcctaaggaacgacctacatttgagacactgcgttggaaacttgaagactattttgaaacagactcttcatattcagatgcaaataacttcataagatgaacactggagaagaatatcaaataataaagtagcaaaacaaattcaaataatccattccaaaatacaatgttatcaaccaactgcacaatcagtttatcctgacatattcaagtgataggataaagttggccatgtattatgaaaaagattatttgtgcattttattgactgggcaacactgcaggacagtcaaggtgatatataatttcctcactgcctggtaaaattaagcacactaaaccaagttatttttctttttaagagatacttacatttccatttattgtttgaaatgtcgatcaagagaatcaacagatgatagtccaatttttactcagtgactgttgtagcattttcctgtttactgattagagtggttattcattattcctcagattgctgaatcccatcaggctgttattatgaaggaatttgattgctttgctgcacagcaggacctgtgctttgagatttttttttctcttttaaaatatcctgtaactacaatgatggtaaagccatgttaaatgacttgattgtacttggagtaattgcacatttttttctatgcataaaaaaatgatgcagctgttgagaaaacgaagtctttttcattttgcagaaggaaatgatggaatttttctgtacttcagtatgtgtcaactgagagtcatatacattagttttaatctcttaatattgagaatcaggttgcaaaacggatgagttattatctatggaaatgtgagaaatgtctaatagcccataaagtctgagaaataggtatcaaaatagtttaggaaaatgagaggagaacagtagattgctgtggcctagacttctgagtaattaataaagaaaaagaagtaccctttggcctacaaaaaaaaaaaaaaaa

SEQ ID NO: 4659 - DNA, 2618 bp, Homo sapiens
gcggggctggcacccgggccgaggctctgattctggggggaggccgactccaccctggctggaggaactgggtgctcctgcccgctggcccctcgcgcgtgaggatctatctcaggctaagaaatggcatttcaaaaggcagtgaaagggacgattcttgttggaggaggtgctcttgcaactgttttaggactttctcagtttgctcattacagaaggaaacaaatgaacctggcctatgttaaagcagcagactgcatttcagaaccagttaacagggagcctccttccagagaagctcagctactgactttgcaaaacacatctgaatttgatatccttgttattggaggaggagcaacaggaagtggctgtgcgctagatgctgtcaccagaggactaaaaacagcccttgtagaaagagatgatttctcatcagggaccagcagcagaagcactaaattgatccatggtggtgtgagatatctgcagaaggccatcatgaagttggatattgagcagtataggatggtaaaagaagcccttcatgagcgtgccaacctgctagaaattgctccccatttatcagctccattgcctataatgcttccagtttacaagtggtggcagttaccttactactgggtaggaatcaagctgtatgatttggttgcaggaagcaattgcctaaaaagcagttatgtcctcagcaaatcaagagcccttgaacatttcccaatgctccagaaggacaaactggtaggagcaattgtctactatgacggacaacataacgatgcacggatgaaccttgccattgctctgactgctgccaggtatggggctgccacagccaattacatggaggtagtgagcttgctcaagaagacagacccccagacagggaaagtgcatgtgagcggcgcacggtgcaaggatgtcctcacagggcaggaatttgacgtgagagccaaatgtgttatcaatgccacgggacctttcacggactctgtgcgcaaaatggatgataaagacgcagcagctatctgccagccaagtgctggtgtccatattgtgatgcctggttattacagcccagagagcatgggacttcttgacccagcgaccagtgatgggcgagttattttcttcttaccctggcaaaagatgacgatcgctggcactactgatactccaactgatgttacacaccatccaattccttcagaagaagatatcaacttcattttgaatgaagtgcgtaattacctgagttgtgatgttgaagtgagaagaggggatgtcctggcagcatggagtggaatccgtcctcttgttacagaccccaaatctgcagatactcagtctatctcccgaaatcatgttgttgatatcagtgagagtggccttattactatagcaggtggaaagtggacaacttatcggtctatggcagaagataccataaatgctgctgtcaaaactcataatttaaaagcaggaccaagtagaacagttgggcttttccttcaagggggtaaagattggagccccacactctacattaggcttgtgcaggattatggacttgaaagcgaggtggcacagcatcttgccgccacctatggtgataaggcctttgaggtggccaaaatggcaagtgtgactggcaaaaggtggcctattgttggagtacatcttgtgtcagaatttccatatattgaagcagaggtgaaatatgggattaaggagtatgcctgcactgctgtggatatgatttcacgtcgtactcgcctggcctttctaaatgtccaggcagcagaggaagccctacccaggattgttgaactgatgggcagggaactgaattgggatgattataagaagcaggaacaacttgaaacagccaggaagtttctatattatgaaatgggctataaatctcgatcagaacagttaacagatcgctctgaaattagcctactgccttcagacattgacaggtataagaagagatttcataagtttgatgcagaccagaaaggctttattaccattgttgatgttcagcgtgtattagagagtatcaatgtccaaatggatgaaaatacactccatgaaattctaaatgaagttgatttgaataaaaatggacaggttgaactcaatgaatttttgcagctgatgagtgctattcaaaaaggaagggtatctggaagccggcttgctatactaatgaaaactgcagaagagaacctcgacagaagagttccaattccagtggaccgtagttgtggaggattgtgagtctgggcagtaaatccacagccaacaaacatagaaacgacaaatcaccatgtaacaaccagagatgactgaaaccactctgaaataatgaatgtggatagctgccttttttaacactagaaaacattccaaaactttaaggtgttggtgtatttgccagctttatttgctgtactttatttgtatttgccattcagtctagcttttaagtatatttttttctttttctcattttcaatgcacattagttttgcatctgttttgtgacctgttagatgtgacacattctctttttgtttattcccttattc

SEQ ID NO: 4660 - DNA, 528 bp, Homo sapiens
cgccagggagctgtgaggcagtgctgtgtggttcctgccgtccggactctttttcctctactgagattcatctgtgtgaaatatgagttggcgaggaagatcgacctattattggcctagaccaaggcgctatgtacagcctcctgaaatgattgggcctatgcggcccgagcagttcagtgatgaagtggaaccagcaacacctgaagaaggggaaccagcaactcaacgtcaggatcctgcagctgctcaggagggagaggatgagggagcatctgcaggtcaagggccgaagcctgaagctgatagccaggaacagggtcacccacagactgggtgtgagtgtgaagatggtcctgatgggcaggagatggacccgccaaatccagaggaggtgaaaacgcctgaagaaggtgaaaagcaatcacagtgttaaaagaaggcacgttgaaatgatgcaggctgctcctatgttggaaatttgttcattaaaattctcccaataaagctttacagccttctgcaaaa

SEQ ID NO: 4661 - DNA, 2583 bp, Homo sapiens
gttcccacttcctcccgccccaggaaacctgccatggcctcctggtgagctgtcctcatccactgctcgctgcctctccagatcttcagttgcttcaggccactttgaatgtatatgagccggtcgtaggggatatcgatggcttagcttgggctcagaggcctgaaaatcgcccccaccaatcacctgtttcccccaatctaccctcctgaaggtcactgacaaagacttcattgtctcctaggagaggctgccatatatcagggctgacgtaattccatcttaatatcagttacattataaaaatttacctcgtgcctgaggccccagagcccaagggtgcaaagcagtaattagtcaaagttcaacttcccctcccactctgggctcaggctgtccctgagggcctgtgttttgagtctctttccagaaccttggtgtgaacttaggtcttggcgtcgggatcccttttcgtcacactcaggtgacctacaggctccgctcgacactgcaaggcttagaccagttcggtccaacagagaaagcaggcaaccaccatgtcatttgaaaacagtttcatcgggatataattcgcaacccatacagtgaatccatttaagatactctgacccatggatcccctgggtgcagccaagccacaatggccatggcgccgctgtctggccgcactgctatttcagctgctggtggctgtgtgtttcttctcctacctgcgtgtgtcccgagacgatgccactggatcccctagggctcccagtgggtcctcccgacaggacaccactcccacccgccccaccctcctgatcctgctatggacatggcctttccacatccctgtggctctgtcccgctgttcagagatggtgcccggcacagccgactgccacatcactgccgaccgcaaggtgtacccacaggcagacacggtcatcgtgcaccactgggatatcatgtccaaccctaagtcacgcctcccaccttccccgaggccgcaggggcagcgctggatctggttcaacttggagccaccccctaactgccagcacctggaagccctggacagatacttcaatctcaccatgtcctaccgcagcgactccgacatcttcacgccctacggctggctggagccgtggtccggccagcctgcccacccaccgctcaacctctcggccaagaccgagctggtggcctgggcggtgtccaactggaagccggactcagccagggtgcgctactaccagagcctgcaggctcatctcaaggtggacgtgtacggacgctcccacaagcccctgcccaaggggaccatgatggagacgctgtcccggtacaagttctacctggccttcgagaactccttgcaccccgactacatcaccgagaagctgtggaggaacgccctggaggcctgggccgtgcccgtggtgctgggccccagcagaagcaactacgagaggttcctgccacccgacgccttcatccacgtggacgacttccagagccccaaggacctggcccggtacctgcaggagctggacaaggaccacgcccgctacctgagctactttcgctggcgggagacgctgcggcctcgctccttcagctgggcactggatttctgcaaggcctgctggaaactgcagcaggaatccaggtaccagacggtgcgcagcatagcggcttggttcacctgagaggccggcatggtgcctgggctgccgggaacctcatctgcctggggcctcacctgctggagtcctttgtggccaaccctctctcttacctgggacctcacacgctgggcttcacggctgccaggagcctctcccctccagaagacttgcctgctagggacctcgcctgctggggacctcgcctgttggggacctcacctgctggggacctcacctgctggggaccttggctgctggaggctgcacctactgaggatgtcggcggtcggggactttacctgctgggacctgctcccagagaccttgccacactgaatctcacctgctggggacctcaccctggagggccctgggccctggggaactggcttacttggggccccacccgggagtgatggttctggctgatttgtttgtgatgttgttagccgcctgtgaggggtgcagagagatcatcacggcacggtttccagatgtaatactgcaaggaaaaatgatgacgtgtctcctcactctagaggggttggtcccatgggttaagagctcaccccaggttctcacctcaggggttaagagctcagagttcagacaggtccaagttcaagcccaggaccaccacttatagggtacaggtgggatcgactgtaaatgaggacttctggaacattccaaatattctggggttgagggaaattgctgctgtctacaaaatgccaagggtggacaggcgctgtggctcacgcctgtaattccagcactttgggaggctgaggtaggaggattgattgaggccaagagttaaagaccagcctggtcaatatagcaagaccacgtctctaaataaaaaataataggccggccagca

SEQ ID NO: 4662 - DNA, 3076 bp, Homo sapiens; identical to SEQ ID NO: 1083

SEQ ID NO: 4663 - DNA, 14796 bp, Homo sapiens; identical to SEQ ID NO: 4000

SEQ ID NO: 4664 - DNA, 389 bp, Homo sapiens
catttttctctggaatatattggccttctacagctattactgaattatagaaactggtttatttctggcagaaagctgcagtgccacctgagttccaaattttaccattctttgtaaacagttggatggattatgataaagaagatgctaccaatgaaatagaaaaccaacgagatgagaagactgatcctcatgtactcagaggcacttccctcctaagtcaaagaccatcctcactgactatgtgccaacgcctcgtttcaggcttgtgactcaacaaagggcttttccattgatagaagcagtttgggatttgtagttgcgacttcttccgatagttacctgcacgtccattgctggcaactgacttgtcattaaaacctggctct

SEQ ID NO: 4665 - DNA, 448 bp, Homo sapiens
cagcaacatgaagttggcagccttcctcctcctgtgatcctcatcatcttcagcctagaggtacaagagcttcaggctgcaggagaccggcttttgggtacctgcgtcgagctctgcacaggtgactgggactgcaaccccggagaccactgtgtcagcaatgggtgtggccatgagtgtgttgcagggtaaggacaggtaaaaacaccaggccctccctgctttctgaaacgttgttcagtctagatgaagagttatcttaaggatcatctttccctaagatcgtcatcccttcctggagttcctatcttccaagatgtgactgtctggagttccttgactaggaagatggatgaaaacagcaagcctgtggatggagactacaggggatatgggaggcagggaagaggggttgtttcttttaataaatcatcattgttaaaaagca

SEQ ID NO: 4666 - DNA, 3212 bp, Homo sapiens
gaattcccgctcggcccgcgacctgccccgagccctctccatggaggcagcccgcccctccggctcctggaacggagccctctgccggctgctcctgctgaccctcgcgatcttaatatttgccagtgatgcctgcaaaaatgtgacattacatgttccctccaaactagatgccgagaaacttgttggtagagttaacctgaaagagtgctttacagctgcaaatctaattcattcaagtgatcctgacttccaaattttggaggatggttcagtctatacaacaaatactattctattgtcctcggagaagagaagttttaccatattactttccaacactgagaaccaagaaaagaagaaaatatttgtctttttggagcatcaaacaaaggtcctaaagaaaagacatactaaagaaaaagttctaaggcgcgccaagagaagatgggctccaattccttgttcgatgctagaaaactccttgggtccttttccacttttccttcaacaggttcaatctgacacggcccaaaactataccatatactattccataagaggtcctggagttgaccaagaacctcggaatttattttatgtggagagagacactggaaacttgtattgtactcgtcctgtagatcgtgagcagtatgaatcttttgagataattgcctttgcaacaactccagatgggtatactccagaacttccactgcccctaataatcaaaatagaggatgaaaatgataactacccaatttttacagaagaaacttatacttttacaatttttgaaaattgcagagtgggcactactgtgggacaagtgtgtgctactgacaaagatgagcctgacacgatgcacacacgcctgaagtactccatcattgggcaggtgccaccatcacccaccctattttctatgcatccaactacaggcgtgatcaccacaacatcatctcagctagacagagagttaattgacaagtaccagttgaaaataaaagtacaagacatggatggtcagtattttggtctacagacaacttcaacttgtatcattaacattgatgatgtaaatgaccacttgccaacatttactcgtacttcttatgtgacatcagtggaagaaaatacagttgatgtggaaatcttacgagttactgttgaggataaggacttagtgaatactgctaactggagagctaattataccattttaaagggcaatgaaaatggcaattttaaaattgtaacagatgccaaaaccaatgaaggagttctttgtgtagttaagcctttgaattatgaagaaaagcaacagatgatcttgcaaattggtgtagttaatgaagctccattttccagagaggctagtccaagatcagccatgagcacagcaacagttactgttaatgtagaagatcaggatgagggccctgagtgtaaccctccaatacagactgttcgcatgaaagaaaatgcagaagtgggaacaacaagcaatggatataaagcatatgacccagaaacaagaagtagcagtggcataaggtataagaaattaactgatccaacagggtgggtcaccattgatgaaaatacaggatcaatcaaagttttcagaagcctggatagagaggcagagaccatcaaaaatggcatatataatattacagtccttgcatcagaccaaggagggagaacatgtacggggacactgggcattatacttcaagacgtgaatgataacagcccattcatacctaaaaagacagtgatcatctgcaaacccaccatgtcatctgcggagattgttgcggttgatcctgatgagcctatccatggcccaccctttgactttagtctggagagttctacttcagaagtacagagaatgtggagactgaaagcaattaatgatacagcagcacgtctttcctatcagaatgatcctccatttggctcatatgtagtacctataacagtgagagatagacttggcatgtctagtgtcacttcattggatgttacactgtgtgactgcattaccgaaaatgactgcacacatcgtgtagatccaaggattggcggtggaggagtacaacttggaaagtgggccatccttgcaatattgttgggcatagcattgctcttttgcatcctgtttacgctggtctgtggggcttctgggacgtctaaacaaccaaaagtaattcctgatgatttagcccagcagaacctaattgtatcaaacacagaagctcctggagatgacaaagtgtattctgcgaatggcttcacaacccaaactgtgggcgcttctgctcagggagtttgtggcaccgtgggatcaggaatcaaaaacggaggtcaggagaccatcgaaatggtgaaaggaggacaccagacctcggaatcctgccggggggctggccaccatcacaccctggactcctgcaggggaggacacacggaggtggacaactgcagatacacttactcggagtggcacagttttactcagccccgtcttggtgaagaatccattagaggacacactctgattaaaaattaaacaatgaaagaaagtgtatctgtgtaatcaagatgaaaatcacaagcatgcccaagactatgtcctgacatataactatgaaggaagaggatcggtggctgggtctgtaggttgttgcagtgaacgacaagaagaagatgggcttgaatttttggataatttggagcccaaatttaggacactagcagaagcatgcatgaagagatgagtgtgttctaataagtctctgaaagccagtggctttatgacttttaaaaaaaattacaaaccaagaattttttaaagcagaagatgctatttgtgggggtttttctctcattatttggatggaatctctttggtcaaatgcacatttacagagagacactataaacaagtacacaaatttttcaatttttacatatttttaaattacttatcttctatccaaggaggtctacagagaaattaaagtctgccttatttgttacatttgggtataatgacaacagccaatttatagtgcaataaaatgtaattaattcaagtccttattatagactatttgaagcacaacctaatggaaaattgtagagaccttgctttaacattatctccagttaattaagtgttcatgtggtgggaattc

SEQ ID NO: 4667 - DNA, 430 bp, Homo sapiens
  misc_feature (1)..(430): n=a,t,g or c
gttgcaaccttataatttctgctttaatggcaatcaagtttaaaaaatgtacaattccacttatccatactattcctttataaaaggcagatttcaggtaagcttctaaatgcatgcgtaatgtagaggctaatattttctggcagtccttggttcctgaaatttgaacttcatatgtgttttaaacttttgtcaaaatagtcatgaaagatatgttatttttgcataatgaggtaatatatcaggggcgggcactcataagacagtataaatccacttgtctaaacttgcatgaggctgtgtgcattgtaaaatgccataaagagttttgggtcagtgaatatttngctgaaggaataacacttacatttaactgagcacttttctgtaataaataccaaagtaggtttttgtagctgtaaactgtgta

SEQ ID NO: 4668 - DNA, 403 bp, Homo sapiens; identical to SEQ ID NO: 2107

SEQ ID NO: 4669 - DNA, 348 bp, Homo sapiens
  misc_feature (1)..(348): n=a,t,g or c
aagattcagaagaaccacagaagttttattttaaccatgtttacaaaaaaaagtaatccatacatcaaaattggggtttccttggttttaatactttaaaatgacacaatccaatcgaattcatgcancacttccagagatacagtgcaactggaaatatttttgccattgcagtggacatttctaaaaagcaaatgcctatggatgctcctgagccttcaaaataaaaagaaaagaaacaggcaccacagttctctaaggatggctgagtttcgcacattgtggaaaaacaacacaaatagccttcaagagtttcttaagcatcattaacattggatttcacctctc

SEQ ID NO: 4670 - DNA, 456 bp, Homo sapiens; identical to SEQ ID NO: 4005
  misc_feature (1)..(456): n=a,t,g or c

SEQ ID NO: 4671 - DNA, 261 bp, Homo sapiens; identical to SEQ ID NO: 860

SEQ ID NO: 4672 - DNA, 652 bp, Homo sapiens; identical to SEQ ID NO: 3036
  misc_feature (1)..(652): n=a,t,g or c

SEQ ID NO: 4673 - DNA, 376 bp, Homo sapiens; identical to SEQ ID NO: 4009

SEQ ID NO: 4674 - DNA, 449 bp, Homo sapiens
ttttgaggatgcattgatgtattgatttgcctgggaacaatggcctatagttcagcctgagaattctcataaagttaagaaggcataaaaatgccccccccgagactcgtcaggagtattgactctcctacagtttaatttgctgcttttgtggtttctgtgatgtcatcccacatgtgtaagctggaaaaatccacgctgtgaagtgtaacctcctgtgtgtatttccacaatggagaatgttaggcttcgtttccctcggttgctacacatctgattacatgtgtcaggaaaacaaacttaaaaaatttcaggagacaaacctttcagcggaattgcctggaacccatgaagtgaggtcatagaacctacaactataataagctgtaggaagaaaagtagcctctgggctactttggtgtctagtcacattgactttccaggtgatg

SEQ ID NO: 4675 - DNA, 465 bp, Homo sapiens; identical to SEQ ID NO: 1102
  misc_feature (1)..(465): n=a,t,g or c

SEQ ID NO: 4676 - DNA, 367 bp, Homo sapiens
acattttagatttattttattatttttaatgaactatgtttaacattttacaaatcttcaggttgttacagttttcagcagtaaatatagtagtaacagcaataaatacaccgaaatatgagatttctctgaaagaatacaaaaaatagaaacacctggaaacaagaaggcaaaatgtcaattctagatctgaaatagaaattaatacagctgaattcctttacaatgctcgtacatgggaaaatgagaaactcatgcgccttataaatgaatgtgtgactttgagcttcacctttttaggaagttttgagggacatcatttgacccacagatctctaaaaccctataatacgtattgataccagag

SEQ ID NO: 4677 - DNA, 263 bp, Homo sapiens
tttttttttagacaaatgctcactttaatcacaattctaaattaattattttcacattaatatagatatttccataaaccaagaaaaactgagttattatacattttttaacagctaacatgatttgaaaattttttattaaaaattgatcagaagctagttgaaattctcaatgtaaatataaaatattcattacaattgtttttcaaagtaaattcagatctaagcttcctgaaaagctgtactatctcatatcataatag

SEQ ID NO: 4678 - DNA, 340 bp, Homo sapiens
ccaatgacctagtattttatttttagtgcctaggcaaggtctgagaaacaaatacattggacaaaacttgttggtcttcttcatccagaaattaagggactcagctcaggaacctctcctggagttgtggctctccccattggttgacattagatattgaattcatgtcatttcctagacaactgtggtgagggatggagttggggggctggagaggaagataatagcacaaattccagtattaggctggattcttctgaaggtgcctggcggttgagaatttagctatgggacccagtgtttcttttctgaaggatcccagtagtctcaaccaagaagc

SEQ ID NO: 4679 - DNA, 330 bp, Homo sapiens; identical to SEQ ID NO: 3047

SEQ ID NO: 4680 - DNA, 383 bp, Homo sapiens
tcttgtgttatttttatttttcaatataaatagagacagggtcttgctatgttgcccaggctggtctcgaacacctggcctcgagcaatccttccacctcagcctcgggaagggctgagattacaggtgggagccactgcgcccagccagcagtttcagttacattatagagagagtttaatggcatttccacagttcaggaccagggaaagaaacacagaggctgcctggccctatgtgaaacttttgggggccgactccaggcctgagcctgctctgaggggatcagtcatgtccccgccttagtcccaggacctgagggagctctggattggtggcttggccagagccaggtggatggcagtgttgaggggctggtgctt

SEQ ID NO: 4681 - DNA, 323 bp, Homo sapiens
acctttatacaatttattgggtttaatattcataacaataactttttctactgaaatagcagtttgtgtttacctgtcgaaccccaatatgagaaatgtgtacaaaagcaacagactgtgatagaaaaaggtatgtgaaaaaattagcaaaccaaagcatgataaatggatgaagcactataaaattactttgctgtttacgtaactgtatctttaatctgtactgtgctaaacagcctatagccaagttttaaagagttacaggaacaactgctacacattcaaagaacaggcattcactgcagcctcctgatttgacctga

SEQ ID NO: 4682 - DNA, 491 bp, Homo sapiens
cagtagatgttgtctgtatttattttctacctttatgaaacaagaacctgctaacaggtaaatcgtaaagtaacatatttttgccctgatgccattagtcacaatgccatggggtaactgctatgtgatttcccatttgcaaggaagcatattaattcagtttctgctcaatatacaattaggttgtagggatatagatatctcatttgagttatctgagtttttcatctttatatctaaaaatctaatctgaaaatagtaaaacacatttaaaaccttagatgctactgtagtaaaagttatgtttataaacatttcagtatattccttcaacttcaagaatcttgaatttccttgctagaaggcttttttcctcaaagattccttttaggcttactttggtgttcaggatctccaattataaatgtagtctctcagcaccacattccgtaaagatgatttcccaagtaacgggtattggactaagttgc

SEQ ID NO: 4683 - DNA, 404 bp, Homo sapiens; identical to SEQ ID NO: 3604

SEQ ID NO: 4684 - DNA, 313 bp, Homo sapiens
aagcagttaaatttttttaacttttattttttaaacaatgggctaaaaataaacagtattaaaaggttaagtttatataatacatatgtacacaattagtggtgttttcttttcagacaaaatactgaaacaaatattagtttaaaaacaaactatacagaagacttcataccgtaacaataaatgtatagtttcttcaaagggagaagagattcacatatctgataacaaaataaactagcaatctagttttctaatctactttatgaggctggattttttttttagaaaagctaatttaaaatatttagaa

SEQ ID NO: 4685 - DNA, 539 bp, Homo sapiens
tccaatttgataagtatttattgagcacctgctgtatgccaggcactgtgcttaatcctgagatccaacagcaaggaagaagagacactgtcgctgccccagtaggactccagccgagtaaggggaagggaagggaagggaaagacatgaataatcacacaaatgaatgtcaaatgatgcagcaaagggaaggcacatgatgcccaagtgtaaataaccagggggcctaacctgggggaggaggagccacgaaaggcttccctaaggagcatggataagtctaccaggcagagggaacagcgtgtgcaaaggccctgtggtaagtagaaaaattaggagagagacatacagccagtagagctggagtgcccagctggggttgggggtagggggagatagtacagagtggggttggagggggagcttgtacccagatgatgtagggcttttgagaacctattacatgtatgttgatccttactctgggcaatgtgaagctgttgaggggttttaagctgctgaatgacatggtctttttg

SEQ ID NO: 4686 - DNA, 523 bp, Homo sapiens; identical to SEQ ID NO: 2527

SEQ ID NO: 4687 - DNA, 297 bp, Homo sapiens; identical to SEQ ID NO: 3062

SEQ ID NO: 4688 - DNA, 379 bp, Homo sapiens; identical to SEQ ID NO: 2528

SEQ ID NO: 4689 - DNA, 490 bp, Homo sapiens
  misc_feature (1)..(490): n=a,t,g or c
gatccaaatacacagaatcaagggaaggagttgcttcttctaagagtgatgcttaatcttttgggtcatggatgaattgaagatttgattaaagttacaataaaaagagnccccntcaaagcacgtacannctgtatcacgaacggtgcctggcctactttttccttttctacccaccccaccccaaccccccctgtctcagtgaaaacctggttgttactaaagtgaaactttaataaggatattgcctagggaagattagttgttttccttgtcattcaagttcattctggacctcttcctctgagctgttaatcagtgttgctaaacagacagggaaagacaagggagagaaaaatgctgattcattcttcagaacttttaaccnttttaaccnctaattcttctccttgagaagctattctttgattgtgaaagctttgttgttcagggnaatatggggtaataaaaatagctaaccatttttaaa

SEQ ID NO: 4690 - DNA, 195 bp, Homo sapiens
aatgatcaatcctgttgacagttttcccgtccatcttccagaagaactcactactcaaccaactgcctggtattcagctgtgactgtgaggatggataactatatttccttaagaaatagcaggaaggtatctcatccaagcagaaaataagaccaacagttgtccaggtctcagtggttctgcatttcttccta

SEQ ID NO: 4691 - DNA, 231 bp, Homo sapiens
  misc_feature (1)..(231): n=a,t,g or c
atgacaaaagcaaccaatntttattaaaaggcattaaaaacaaaacaaaacaaaacaaatacaattctgattaaaaagagacagacaccatgtccacagatgggaagaacttatattctaaagatgttaatttccccttcaatgcaattcttctcaaacttccaacagacattttgttcacagaactttgacaagctgattataaaatgtacctgaaaaagtaaatgtgca

SEQ ID NO: 4692 - DNA, 299 bp, Homo sapiens
cgtctggttgcaaatcagaaatatttaaaagttttaattcagaggcttccttcaccaaatgaatctaagaatctggtatgtgttgtaaaactgcatattgtgttgggcattcaggaaaaaaattctctgtacatttgaacttacactttgggaaattgctaaaggtagttttagtcattcacattccaaaccaagcacgaccaaaaacaagcttttaaaagttcaagcatatttgtgtattgggaaaagttaggaatgtaatatttagtgggtgggcatttttaaataatgtacttgtc

SEQ ID NO: 4693 - DNA, 310 bp, Homo sapiens
cggtttatttctgattatatttggagaggccaattttacatgatagcttcaaaccaaccattgtacattaaccaaattttacacaagccatttgaaaaaagatctaaaaatgtgcttagttattggtattatataacataacatttatcaagcaccaagagtgtgctgagagctgtacagaacaaacatagaaaagacagtccctgccttcaagaatacccattccttcaggatcttgcacataaaatttcaccttacattccacactcttttattcataaggcataaataaggaagtttgttgcatttc

SEQ ID NO: 4694 - DNA, 325 bp, Homo sapiens
gcatataccatcattgccactataatagagatagaagatacattaagaaaattcagtttgtatcaataaaacagatcaacacagaacaaggaaacaccatagatatttgtaaatgagatcttctcttttgctactgtgtatatatattcctttatatttatacaaactcacaacacatgacatttcatatttcatatgccactgagaagaggtgtcagtatacagaacataggaagaagaaaaaagcatgagaacatctgcttagttaggaatctgatgaggagagacgtgagagctattgttcctctctctgctcaggccctat

SEQ ID NO: 4695 - DNA, 495 bp, Homo sapiens
  misc_feature (1)..(495): n=a,t,g or c
tttttttaaatttaaaggagtttaattgagcaataaacagttcaagaattgggcagccttcccagccagagtaggctcggacactccagcgcagtcacacggtggaaggtttgcggacagaaaatggaagtgaggtacagaaacagctgggcttggctacagcttggcatttgccttatctgaacgtggtttgaacagttggctacatttgattggccaaaactcagtgattggcacaagtgtagtctgtttacacctccacttgtcacgatatacagacaaacctttaggccaaacttaaatatataaggaggcagctttaggctaaactttatttcaatacctgtattccaacactttgggaggccgaggcgggagggatcacttgagcctaggaagttagagattcagcccaagcaacatagtgagaccttgtctctgtggaaattaatttagccngggcttggtagcctgtaccngtagtcccagctactc

SEQ ID NO: 4696 - DNA, 441 bp, Homo sapiens
  misc_feature (1)..(441): n=a,t,g or c
tttttttttttttcttggttttgtaggcatttatttacatcatatttcaatacttcagaagcttaaacagtgtcaggggtatagcagttctgagaaacagttttacaagaagacataaactaaggggtacccatgagtgcgtctcatccttcctctcccaggccagagtaacaggtatgctgagatgctcttgcccttggccccggggtgctcacctccagcctcgagctgcctcacccagttagccagggggctgcacaggtgtttgcgtgtcctacatgtggcctgtcatgaagaaggtccgcatacgtggctctaggctgtgcagggcaagtcttcccaagggactnaaggaagtcaccctgaaatcctctccccatgagggacctcttcctaagtcagattttctcactgctcctngttccagntcctgttgccatt

SEQ ID NO: 4697 - DNA, 546 bp, Homo sapiens
  misc_feature (1)..(546): n=a,t,g or c
tttttttttttttttagtanctgacagttttattatactttaggggaagagatggctagtgacaaggagaattcaagattgttcaaatctttacagaagatttttgatactagcaaatgtttctcaaagataaactagnacaagttcagtatgggacaaaggaaacaaagnaaaagacattataatcagcatgtcctacggaaagnctacagtgattcaacatgtgctttaatttatactgcttagatcctttgagttcagatgtcttgagtttttgaggacagtaaaacaagtaaaactgggatgaaattaaagctatgtgggcaaattagtttcagttaaatcaggaatatctaatacaaagcttacaaactccaaaatagttcagccaatagagtaacttcccaaatnctgganttaanctttcatcacaaatttaaaaagggaataattcttctaggactcaactctggctnttaacaaggtgcaactccttcatattactttctgctcccnactatttcctgaatccagancttgcctgct

SEQ ID NO: 4698 - DNA, 327 bp, Homo sapiens; identical to SEQ ID NO: 4022

SEQ ID NO: 4699 - DNA, 436 bp, Homo sapiens
agttgcataaaatctgtgtccaccctttctgccagctctagtttcctcttgtttcttttaaatgcagctaaactgaatcttgtggtcatgatgttaggagggcaagagggtattccatgatctactgcccatctgtaggctccttctccaactaaaaagcagggaggaattctgccagccgagagcttgcccttctgcccttcacataagagtctgttggcaaccgagactgggttcttgattccactcagtgctccaactgctccaaaatttaaggattttccatccattatgctgggcatcacactcaatttcacctaacagatttaggattaggatcccattcctggcatttgtaaaagggaggaatcctcacactaggaattcagggaaaaattgtttttggaaaaggggccatacacctacatgtaggggg

SEQ ID NO: 4700 - DNA, 214 bp, Homo sapiens
tactatgccctttattcaggagtgcaaaacacttaatcaaaaagagcatccttcacatatttaaagagtacattgaggcacagaaagtttgcccaaggcaagatagaaagtcgggtttatagacacaaaatgatctagaattcttcatgtccaattccttaaaatacaaactgtagactatttgtaatgcctccatcttattttatcaaacatt

SEQ ID NO: 4701 - DNA, 443 bp, Homo sapiens; identical to SEQ ID NO: 2154
  misc_feature (1)..(443): n=a,t,g or c

SEQ ID NO: 4702 - DNA, 349 bp, Homo sapiens
  misc_feature (1)..(349): n=a,t,g or c
agcaccaagaacgcttcctncacacgatcttcaggatcgagcgggctgactgggagtgtctgcctcagtcccacgtggcacttggaaaaaacagagcgaggcccccccaagaggcagcgccacccggccgccgtgctcccccaacttggggacgtctggccttggacagctgggcccgtctctcaccacccacctcagaggcaaaaaaggattcacacccagatctctagaaaaatgatcaaaagcaggtttcttctcacagccaagcttcctgggacatgggcagttcattacatctngggaaaacgtaaatcattncttcaggctgtcaatactgtgtccctcacat

SEQ ID NO: 4703 - DNA, 333 bp, Homo sapiens
  misc_feature (1)..(333): n=a,t,g or c
tgacataagatttattgacttcacatcagcatttaagtattgttaaatttgtgtaacagtatttgggttgggaattggtacatttccagttgtacgaaagatagttgtattatgttaggcataattatgaccntattattgtcattatttgaagattatgtgtgagctcaggagatatctatggggttcaagttgacaaggggtgaccctgtgatgggttaatactgaggtgtncaacntggattgggattgnaaggcctggcaaaggtatttgatccccggggttttgtnccctngaggggtttttgtnccaaaggggtttaacccttttga

SEQ ID NO: 4704 - DNA, 149 bp, Homo sapiens
gctttgaatttgcaacccactcttatcctattttacaaatgagaaaactgaggctcaaagccaacaaacaattggcttaaaatcccatgctaagtagcacagactggaccagaacttagatacaaacttgatttaagaagcctctgatc

SEQ ID NO: 4705 - DNA, 241 bp, Homo sapiens; identical to SEQ ID NO: 2158

SEQ ID NO: 4706 - DNA, 447 bp, Homo sapiens
  misc_feature (1)..(447): n=a,t,g or c
gatattggtaacatctgaaagactgcttaaagtcaaattgtgaagaacttataatgttggaaagattttatacttcattattacaaagtagtgtgattatcaaaagggagtggttcatacttaaaagtccaatgcaatattctagacaagagactcaagttgaagaagcatgaggaacagtaatcaaggtgcaaatataacttattttttagtttgtaaaatatgcaaagagattaaagactagataagccattcactattacagtttccctctttacggccttaaataggcactattagaaagtaataaaaataaattggcaatnaaaggtcnctctagaagcactgcctgaagactagcagccttggatattcccatcaccaacaaataagaacnctattcntttctgcnaattttcatcccnaacaccaattactggncaatct

SEQ ID NO: 4707 - DNA, 604 bp, Homo sapiens
  misc_feature (1)..(604): n=a,t,g or c
tgtccccggtgtcaccgagcgtgttgtgtgtccgtgcggcgcggcgctcgtgtggctccctcgcgcccaccacgctggcccccgggccccggctcgcccttcccaggcgccggctgcagcagagtttcagaacaagcttcctggaacccatgacccatgaagtcttgtcgacatttataccgtctgagggtagcagctcgaaagtagaagtggagtgttgccagggacggcagtatctctttgtgtgaccctggcggcttatgggacgttggcttcacgacctttgtgatacaccatgctgcgtgggacgatgacggcgtggagaggaatgaggcctgaggtcacactggcttgctcctcctaagccacagcaggctgctttgctgacttgaacgaggtccctcaggtcaacgtccagcctgggttccaacgtccagaagcccggaagcactgtgatcttgggctcgtggtggaaactccaangatgaatgtaaactgggcgcctgaatggaaaagaactgaatggctcgaatgatgctctgggtgtcctaataancaaggaacctcgtaatnatggccttaaaaacaaanttgggaangtaaa

SEQ ID NO: 4708 - DNA, 481 bp, Homo sapiens; identical to SEQ ID NO: 3089
  misc_feature (1)..(481): n=a,t,g or c

SEQ ID NO: 4709 - DNA, 138 bp, Homo sapiens
aagtaacctacaaagagcaagataggagatctgcaaataagattttgagtacatagcaggggccagtagtcaccctttcacaatttcattcttggagttccttaacttctggacccagagatcattgaaaacagtgta

SEQ ID NO: 4710 - DNA, 458 bp, Homo sapiens
  misc_feature (1)..(458): n=a,t,g or c
ttttcttagagagcatatttctttattctatttttatcatgcaggaactgaatcagcaggcaggatactgctcttctccccaacctcccccatctaaaggagatgagattttgggacataggtacaaacatagtggaccataggtacaaacatagtggacagggaactcagtggtcttgtgggctacagcattaaccacagcatttgttagttactgccaagaagcctgtatctgtagggtaaaatcctcgctgaagtgggttgccaaaacaatcaatatcacgttgcctaagagcaggaagttctcagggtccacgtgcagcttgttacagtgcaggtcactcagtgtagcaaaggtgcctttgaggtcatccgtgagcataacagcttttccgaagnggattcagcaccttcttgccatgtgccttgactttggggttgnccattattggcacagt

SEQ ID NO: 4711 - DNA, 442 bp, Homo sapiens
ttttacaaaatccaaaataattttattcacattttcagatttttgcttccacaaggtgttcagcaaacatgctaaggcgacagaatgtctagttggtcacgacatgcaacgctgaccattcaactgatgacagcagtgaccacgcccacctgagctaccagccccacagcacaaagggggtttgcgggaacacaccaaaccacacagcaaccagcaacctgaggtaggtctctttacagtacaaaaacttctacgccagtgtgagacactgattagcaagagctgcttaaagttgcagactttgaggggagagagagagagagactgtgcgacgactgcggtgagaaaggaaaacagacccacgaaatcctgagccctgccactgaactgtggaggtgtgggaataggcaaatgaaaaagtgccacctcaaaaagcagcagt

SEQ ID NO: 4712 - DNA, 456 bp, Homo sapiens
tcgttttcaagcttttcgcctacattttagactaaccctgcttattcctgtgaatcaagcagtgatctcctgcagcttggaagaaaaattaagggatgggtaatataaaatctgaatcaatatattagttctgggcaattattctgcaaattctaccaggtaataaaagtgagtagggtgcccataacccagaggtttcttcgtttaggaaaataaaaccaaggaacttcatagacccccaaaggaacttctatatcttgacaggtaaaagtttagatggaaattatctaccacaccacacttatggaaatagctatactcactctattatttgcaataggattatacatggtagcaccttctaactgaaatattaaacagagagtttccattgctggtcatattttgcttaatcattatccttatagcagggataatagctactaatgaaaagga

SEQ ID NO: 4713 - DNA, 418 bp, Homo sapiens
  misc_feature (1)..(418): n=a,t,g or c
atacaatgatctaaatctaaaatctttcacaaggtgcaactttccagtgataaacaagaacaggaagtgaatcttgaatacaaccagacttcaagttcccttcactattaaagtatctcctttgctgtctgttacctgagtctcacttaaccagcgttaaacttccatcattctagcccaacagttataaatatctttatttctttttgaacaaaacatatttcctattagactgggaaattttgacacactcaaatgtttgaagtcccaagagggaaggacagctaaaataaaaggganttgaggcaggcaaagcaacctcaggaaaaggcaggaantggaaaacaggatggtttaaccctcttttaaaaccaaattttttacttaataggccctcnacccnaggcttttttccgaa

SEQ ID NO: 4714 - DNA, 320 bp, Homo sapiens
  misc_feature (1)..(320): n=a,t,g or c
ccaagttaatattgttttattacatctccccatatctgtaaatattactttacgcatccaatttttgcttattttaagcagccaagtttctttaaaagcaaagtaacttcttttaatagcaatactaaaactctgtttaaaacattgcaaaacaaaccccactgcattttagacagctgcttccttataaaagtangtaaaaaacattctgtatatttacataaaaaattctaaatcattcactgggggaaaaatgaaagnctttaaaaatatatttccttgncacactcaaataccataaatttcaccttacacatata

SEQ ID NO: 4715 - DNA, 369 bp, Homo sapiens
  misc_feature (1)..(369): n=a,t,g or c
aattttattgaattttgtgaaattttctgtccagattatatactcttaacttgaaaggacaataatctgtgcttatctgcttatatatctgaaatcacccaccataatcatatacaagcttagtatctggagaactacaaggttattttttataccacaagatctgctcctatttaatgtaggcttactaaaatcttctactgtctttatacagtcctgtatatagcagtttcatatataatgccagctgttcagtaggcaagcataggtcaatcattccccatcggtaatcactgtacccngggggaaccncctgttcccntctctcagggggntactagggccatctttttnccctggccgggggcc

SEQ ID NO: 4716 - DNA, 353 bp, Homo sapiens
  misc_feature (1)..(353): n=a,t,g or c
tttttttttttagagtatatggatgtttattgcactattttttcaacctctataattttgaaattttcacaataaaaagttggggacaaaatttttaaaataataataacagcacttattctctacctgggactgtactaaaggatttttgtgcatttcaaatttaatccttgaaacaacaatacaaggtagttataattattaccatagtttttcctgacaatgaaactaaggtacagggaagttaggtggttttcacaaagttacacggataattctatcaatgacaggtgagattcaaattgagtatatctaacttgggnatcccgtgttctggaataaccaaaagtata

SEQ ID NO: 4717 - DNA, 350 bp, Homo sapiens
  misc_feature (1)..(350): n=a,t,g or c
tttttttttttcagttaattgaattccagggagatttattcccaatgttattaataaattctaatgccacctataactttcaattgccagttaattaacttgcaatgggtgcattgtaaaaggcaaattaaatactttttcaggcaggggctggcaaatttaatgagctgatgtgtcccaagggagacggccgggctcacacatcccatcaaatactcctcccatcagcagatgagagtgtgatctgggtgagtgacaactggacctccgcatcctcatctgtaaaaagggatcacaaaacctgcctncaggggcccttcagatacctggggtttggatcctgtgttttt

SEQ ID NO: 4718 - DNA, 198 bp, Homo sapiens
  misc_feature (1)..(198): n=a,t,g or c
tttttttttttttttttgatcttttggaagcattttaatgctgaaaataaatacatttcccttttcaaactcactgatggctaaaatcttaattaattgtacaaatttagtaacctactaagaaacatgtgcatttttttttcctttcacaagngctgctgttacttgaaaagaatgcttctggaattaggaataact

SEQ ID NO: 4719 - DNA, 396 bp, Homo sapiens
  misc_feature (1)..(396): n=a,t,g or c
cgcattctgattttattttaaaaatgtccatatacctgcagaaaacatgagtgatacaatgaacacctatgtattcttcacctagctttaccagttataaataagttgtcacatttgttttatctattattattattactgttggctaaagattttgggaggaagctacctgtagcataacctttcagccctaagtgctgcgtgtttctcttgggcacaaggacatccttgtacataaccatagtaaagttatcaaattcaagaagtttaacattgggaacaaagattcacatttctcccattgttccaataatgtcctttgtaggccatttttnttttnctcccctgtgcagggntctgatccnggggtcacacattgtattcgtttttgnccat

SEQ ID NO: 4720 - DNA, 434 bp, Homo sapiens
  misc_feature (1)..(434): n=a,t,g or c
ttttttttctcagtttggaatgtcctagcctatccacctgccaaggagatctacttcttttttcctccatgcaatgcttaaatgtctcatctttcctaagcctctcttccagttaaaattaatgacaaagatttggggcacttgcctttattctattttttaatactgggtcttcctctcctactatgtaatctctctgagagcagacacaaaattgtgtacatttttgtcccctatgcatccccaccctgatgtctatcacaaagacctgtagtagggtattcatgtttcggcaaacataattatggatgtgtacaccatggaatattactctacatcacacaactctatggcaacgtcagncattacatcttcttaatggcaaagttttacttaatacttatctatttaattaaaactacattatttatact

SEQ ID NO: 4721 - DNA, 444 bp, Homo sapiens
  misc_feature (1)..(444): n=a,t,g or c
tttttttttactgttaaacaatcttttaatacctttggaattactctttataatttttatacttcaaattaagaaaaccgcccaatgttcaggcaactttggcattaacatttccaagaaagggacaaaaacaactattaatgcaacatcatgaagagattggggacaattgtgggtgtctataaagctctctttgaaaagctctttaaagcgaactcaggtaaatgggaaatgaaatctggactttttacttaggccaaataacaatgaggtttgaatataaaatgggaagnttcagggccctttctacctaaggatggaagggcatttagtttgctcaaattcaaactccaccaaatacttctgnatgggaaagtttgggcaacagnactgggacctgtgggggggttcaccaaccttttttggtccaagggtgatcnggtt

SEQ ID NO: 4722 - DNA, 292 bp, Homo sapiens
ttttttttttttattgttggaaactcaacttttattctgggttaagcctctagataaaatcttaagtctgccaaactattattccccccaccttttctttccccaactatcaagaccattctaggaagtacgtcactctaccaaaaatgattgagttgtgttgggcctggggaaaaagtcgggcaaaaggagcctttcttgtggctgctgatagttaggttcatccaccaccgcactttgagctcgactagagtcgccatggggtttcatctgtctttgtggccccacagtg

SEQ ID NO: 4723 - DNA, 464 bp, Homo sapiens
  misc_feature (1)..(464): n=a,t,g or c
tttttttttttttttaaaaaacaattccatttatttttgcatcatacaacataaaatccttagtaataaatttaacaaaggatatacaagacctctaccaaaactacaaaatgttgctgaggaaaattaaagatgacctaaataaatggagagatgtgccatgttcatgactagaactttcaaaactgttaaaatgtctccaaagtgatctacaaattcaacccaaccccaattacagtctcagcataatcatactcctttttatagtaattagcaagcctattctaaaattcataattgaaacacaaaagntctaaaatcttggggaaaacaacaaaattgggggattttacatttaacatcagggttttactaaaattccattccatgggttctcggctgggggccaattttgcccctcagcggggcatttgggcatttcnggggtacattttggggtgtca

SEQ ID NO: 4724 - DNA, 430 bp, Homo sapiens
  misc_feature (1)..(430): n=a,t,g or c
ttttttttttcagncacaggtagttttattgttatgtttcacctagntaggcaatttttaaaaatagtgtgtagaaatgaatagtttcaaactgagtaaatatagtagtataccatgtcataaaacaatcaaatcaaaagcaactgccaagctaataataagtcaaagaaatagtaattctggcttgtacagatatgtgcagtgttttcaaagctcttaacagttaaccactaacatgtatctccaaagcttaacttagnagttggaagatgaatttcacagtaatgtaattttaaccaccatttacattcactttaatatattactanggatgtttactcctatgtncacaatgggtgctttcccagtgttccacantttcacagtttccaatttgtacatatgtgattgcactaacnttggggacagt

SEQ ID NO: 4725 - DNA, 469 bp, Homo sapiens
  misc_feature (1)..(469): n=a,t,g or c
ttttttttaataattacttccagtttaatttatagactatataatttgtcatgaaacaaacagttttcattttgacataatttctgacaactcagtgacataaatatatccatgtgagctcctatnnnntttgacatgctcacttacctcacatcagttctgccgatagatttggtaagtggtgcttttagtttccttaatgcacccctcaggatttcatgcaaatgaaattattatgacaaatttttctatagccatttctaacacagggaactcataaagaaatcaaatgtctgcacttcactgtgaaaacactaaactctcaggccataatgaggactccacacattatcngaaaccccagggcataccaaaaggncagggtccccggggacagtctttgggngggggagggtcataatgttggatttgggccatnctgaatttcttgntcttgaacttggccgct

SEQ ID NO: 4726 - DNA, 366 bp, Homo sapiens
  misc_feature (1)..(366): n=a,t,g or c
tttttttttttcacaggtttacaagatttcttctggaaaataatcataaattcaaattatattataatttgcagtttacacaattttaaaagggaagaaagatgcctttctttttagcttcatttggacagtaagaacagccaccaacccccaggtgtggaaaagttgttggctgagtgacaatacttggtcacaacattgaaaagaagtatttacaccattctgggaagtaccaaatattaggaaaaaacaaacaaaaacgggaaacantccctagtaggcattccttgggcgtgcaaaggtcagcagggaaatgntttttccctttggacagtttttcatggataagtcttggggaggcctttc

SEQ ID NO: 4727 - DNA, 472 bp, Homo sapiens
  misc_feature (1)..(472): n=a,t,g or c
tttttttttgggaaatagaactctttatttaaatatcagtacagaacaataaattactaaaggaaacaatcattaatataaattttttcttattaaataatttaaaaattctctttcaggacacggaaagaatccccagaggtctgaagtctaacgtgattattttactgacaatatcatttgcaagaaagagatcatcattcaaaggaagtacttggattttccaaacaaaaagagaaggaaaggaaaatgatatatcttgtttagtcagccaggaactttaagtgcaggganttccatcagggtaggcaccaaggggaaatttgccattaattatgttagggtattaactgctgggtaaaatttgttgggccaaaaggggatccagggcagtggaatggggctttttggggcccctgggtgtcctcctggtctgctgggggnccctgggncttacacctngggccttggg

SEQ ID NO: 4728 - DNA, 182 bp, Homo sapiens
ttttttttttatgtagaaataatgtacttagtgatgcataagacaacagtccagattcagttttatttggttttatttcctacagtatagtgaggaataaaattggggttgatcaaggctttacagatttgagaagccttgaaaaccctacaaaaatatttagaatggatttcataagaaac

SEQ ID NO: 4729 - DNA, 275 bp, Homo sapiens
  misc_feature (1)..(275): n=a,t,g or c
ggctttagtacaattaccaagtgtaatcagttacagtaattctgtatgtatctcagcagtattattttccagcatggctttacattttaaagaacttaataactatagaataaacagatgcatgctatacgagttggaatgtattagagctgggttcccttttgtgtgtgtttgtgtcacgtgtttagtttatccntagtcatgaatactatgttgcctagatacagtggggaacaccgggaaagtgaaatgcagttttgttttctgggaggcaa

SEQ ID NO: 4730 - DNA, 361 bp, Homo sapiens
  misc_feature (1)..(361): n=a,t,g or c
caatcantntnactaaaaaattttattgaactggtcaattttctttgccaatattactgtattcttatttctagtaatagaagtgtgaaaaagcatcaaggaaacttaaattgcattctcatactgactgcatacaataattctgaaaacagcggaagttatatatatccctcataagtaaaacatgagtaacacaacaantgaaaaacgantaggagacanttcaaataatggcgacctgttattctcatctngttaagtactattattttctaacagggantttgctatttcaaatatattatctgaggatgtctatatatttatatttngaggtactatacaaatttggggccaatgg

SEQ ID NO: 4731 - DNA, 472 bp, Homo sapiens
  misc_feature (1)..(472): n=a,t,g or c
caaatttaacttgctattgagaaagtttaacaaattgtttaacctgaaagacaaatttcctggtaaacaaccatttaacatcccctgtgtctttgcctcaaatccattaccaacaaggcagtcatcctttcaaaatgcaaatctgattatatcacacttgactagtttaaaatttgtcaacccttcctattaattttatgttgaggagcaaacttcttaacatgacccatttatcatgtatcatccaaactgggacactctgagagtgaaaagagagtgattaatttttataccagtaaaccaggggcagcccctaggaaaagaggttaggtgtgggctatcccacccacaaggccctacctcttcaaattccttcacattctccctcactgtttcccctccaggntccctccagcagggcnttttgttaggggnaaaattaatttaggtggggacagtgggttatggcctt

SEQ ID NO: 4732 - DNA, 299 bp, Homo sapiens; identical to SEQ ID NO: 3098
  misc_feature (1)..(299): n=a,t,g or c

SEQ ID NO: 4733 - DNA, 342 bp, Homo sapiens; identical to SEQ ID NO: 4032

SEQ ID NO: 4734 - DNA, 340 bp, Homo sapiens
ttggaccctgaaaatccaaaccactgttgctattacaaaatttttctttaccctagtatgcacccctgggccaagcacagatgcattaaaaatttgccaagagaaacaatgaagtcactgataatacaaagcatgagagtatcatgaaattcatgtctttgttttcttcctctagatacttaattatttctcattactgatcattttgtggttattggcagaggggcaaggaaactccaccactgtaaacatgtagagacacatgctcctcagtagaccagaagtctgcatatgatgggtctgttcacaaatccaatgtgaacaccacttcattaatcag

SEQ ID NO: 4735 - DNA, 277 bp, Homo sapiens
ttaagtatcaaagttaagtttaataaagtaagttccttccattttgtaatgtataaaataataccatttaaacaggcagaaactagctaatctgcatttatagagcatagttttttgggtgggaaaaaagcattctttcatcatttcacctttactagaagaaacagacttatgatggttcttactattatttttcaactttagaattattcattcagtagaagctgtatttcaagtacccaaccattctgtttttcactttcaatgtaatcttcaa

SEQ ID NO: 4736 - DNA, 505 bp, Homo sapiens; identical to SEQ ID NO: 4033
  misc_feature (1)..(505): n=a,t,g or c

SEQ ID NO: 4737 - DNA, 134 bp, Homo sapiens
  misc_feature (1)..(134): n=a,t,g or c
attgttggttttaatcagtatgcttggctttggcanttaaaaataaatgaaaagtaaactgcagacattaggaaccattcccccaggacgtacttaaagaagaacagacaaaaaataagaataggggagtgacg

SEQ ID NO: 4738 - DNA, 415 bp, Homo sapiens
  misc_feature (1)..(415): n=a,t,g or c
tttttcttctctccttcatttattcatttgttcaaaacactgtctagtaccaacattgtccaccgggcattgagaatacaatattgaagaagagtcactgcctgccctctggaaaaatcagagtatttgaaagantacacacaagtaaacaggcagctatggcaaagtgggtaaaagctgcaaaacagggaagtttcgccaagtntcagatgccaagaagtntcagatgccaagaagaaagggtgcatgacatagacttgggggggtcagtagtggtttctggaacgagtgacatttagactgaaactggaaggntntgagtaagggctaatcggaccaagntgaagagttacagaagcngaaggaacngtagggaccattgctcagaggcnaaaagaaagctttgattttttga

SEQ ID NO: 4739 - DNA, 357 bp, Homo sapiens
  misc_feature (1)..(357): n=a,t,g or c
atgctgctatgacagaatacccaagactgagtaatttataaagaaaagtaatttatttctacagtgccagggtctgggaaggtgctggtatctggtgagggctttcttgctgcatcattccatggcagaaagtgagagggtgagagagggacaagggaggggaactgaactcattcctttatcagtaacccactcctgcaataactaatccactcccacaataacaacattaatctattcatgagggcagagctntcatgacctagtcacttcttaaaggttctaccttaactccattgctttgggggattaaatttcaacatattaaacccttgggagggacacattccaaaccac

SEQ ID NO: 4740 - DNA, 421 bp, Homo sapiens
  misc_feature (1)..(421): n=a,t,g or c
atannaannngaaaagtgttctgtttattggtctggcttggtctcctgtgcgtctctcagaatgctgctctgcccttgtgggtcnaggggtcgcagtggnggtcacactggggcctgcctctgctgcccacctggaagtggcctcagtcagtcttcctgaaccctgtcagcctaaacttctggaagagggggatgaagccttggaggacgctgtggatacggtacactagtccgaagtagatgccaacggtttccaggggaggcgaaggtgagcaggccgaccccaagagacatgaaccagtctgcgtaatagtgataacacaccagcaangccccnatggcaaagcacaggangacgaaattggaaaaactcatcatctttctttatattcagtcttctttaacttangaggcctccant

SEQ ID NO: 4741 - DNA, 439 bp, Homo sapiens; identical to SEQ ID NO: 2905
  misc_feature (1)..(439): n=a,t,g or c

SEQ ID NO: 4742 - DNA, 471 bp, Homo sapiens
  misc_feature (1)..(471): n=a,t,g or c
tttactttataataaaacacttttattgctgcagaatgttaaactgcataacaggcaccagatggtcaagacgagggaaatatgagaaggcaaatgatgtgaggattagtatcttgagattcacctggtctggaattatgtcataggctactatgcatcagaatcacatggagggctttctaaaacagactgctcagcccacccccagggtttctgagttcataggttataagaggtaagttgaacaattccccagatgatgctgatgctcctggtccacaatgtgagaaccactaagttggagtactgactcatagagataaaattctttgaaagaaatgtactgttttaagatactgtaaaatgtggaggcagggcaaacgtttataaagggctgttatgtatgaaatgtgcctctgacccaaatccacggactttgcgaaaatcaccaaggagactttgcantaagtt

SEQ ID NO: 4743 - DNA, 279 bp, Homo sapiens
  misc_feature (1)..(279): n=a,t,g or c
ttttttttcagatttctagaatcctttaattgtctgcacccatagctgaagtaaaatacaatatcttattaaaaggcccgtattgaaagaagaatcagtaaactcttcttaagaagagtcagctgctcctgcgagtcagcgatcttcttaaatgcgtgctctgcttctggtatccttgagtcattgctttagcaggctgcttccttgaacttggctgtgagntgggggaatgtggttctcccttgagaaatgggttccagagagctcgaagatgagcag

SEQ ID NO: 4744 - DNA, 510 bp, Homo sapiens; identical to SEQ ID NO: 3622
  misc_feature (1)..(510): n=a,t,g or c

SEQ ID NO: 4745 - DNA, 724 bp, Homo sapiens
  misc_feature (1)..(724): n=a,t,g or c
aagagagcgcaaagcagtttattctagcgagcaagggagtgagcgtccaggaaggagcaggtgtaacccggcggtcagtggagcctcagtgaggtgtgtcctgttttttcctgcaatcgccgcagaagacaccaatggtcgcgttcaccagctggatcccacacagtactatctccaggcaggaggcggccaccagcagcgagaagagcgtcacattccaggggaccacgcgagggggcgcctcgcaccgatcccatagagtgcggttgagcaagtaagctcccgcggtgtcttcgaagtggtagccccactcgccgttcattaagcatctgggtccatttcggagcccagctccagacaccgagaggcagtagatggcaccaagcaccccgaacgccgaggagaagaccgagcgcacatcctgcagcggtttccacagcacccagcaccacagcagcccttgccccctgcccgaacggctgcaatcctggacacagtaccattaggccccgccaatgaagccgccatgagccaacttgcaagttgaaatggttgtgttgtccaggaagtttcccattggtacnacaagaaggcgttgccacaattnaagacgangccaaggttttggggangccccaaaangggaattttccctcggcgnattttgctttagnaattcctaaggggngttaatcgaaaangcaancgttcgggnattttcgcc

SEQ ID NO: 4746 - DNA, 415 bp, Homo sapiens; identical to SEQ ID NO: 3624
  misc_feature (1)..(415): n=a,t,g or c

SEQ ID NO: 4747 - DNA, 411 bp, Homo sapiens
  misc_feature (1)..(411): n=a,t,g or c
antcacctctgtcccccaggctggagcaaaataaataaataaaggtgcagctgtgggtcgaaggatggtgtggaagtttggggtagacatccaagactgcagtaatgctatgcccagggtatattttggggcaaaacccccaaaataccctggcaaagaaagaagattgtgtttcagttgcaatcatctaccctaatccctttctgagggcctctggactcgcttgggctcactgcccttgtctgatggggtaggatctcccagaggagaccagctaattatactttaatgaggtgacttacagacactggaaaaggagttggctggtacactccccatcatcatnagcagctctctncgaggatacagtctgtgaataaatggtaccagaacnctcttgagcctcgtgcc

SEQ ID NO: 4748 - DNA, 483 bp, Homo sapiens
  misc_feature (1)..(483): n=a,t,g or c
ttttttaccattataaacacgttgctttttattttactaagttctttacatatgctgtctcactgaataaaacaacaatcctgctaattagatggtattatcatcattctacagagaagactaaagagaggtttaagtggtctgcccatgtttacactagacactgtcagaacaaagcctcaaatgcagattttctaacaccaggtccagtcttacccataatacaccaaactgcacaccaaccaagttttcttaaggtccatggagcaattgaaaatatgtctaaaacatctgggggtatgtgcaatggggaataatgggtgttggattattttactagactttcaaaggaattcataattaaaaagcaagctaagaaccactgacctatactgtaagttacctgaaataaggnacttnttttgttttattcntgtttataccccagcattacctataatgcctagcgctactataaatgcc

SEQ ID NO: 4749 - DNA, 237 bp, Homo sapiens
actgttcaaacagcaatgtttagttgtacaacacataaagtctagcaacaattacaggaccagtttgagtgtctgtttgcttgttttcaattgggaaatttaactgtaatgtcaccgtaagattggctgggactggtaacatttaagaaacgggttgttcttgcatcccctaggcgtgggcctcttgctccatcaggacttggttgtagatgaatggcccacaagtcaccagccttt

SEQ ID NO: 4750 - DNA, 348 bp, Homo sapiens
aattgcagtcacgtttatttgcagtttctatacacactttctaggtaatcaaacttttctgatacattttttttgagaggggttcacaatgaaactgtcaccatttttactaaaaataaatacaagacttaaagtgttgcacagctctaaaatatacaaaggcttggattgaatgtaaacgttgaaaacatcttacaaaagaaaccatctttgcagcaatttaaaaagttcatatttacaaatattacaaaaatacaaaatggatgcaagtccataaaccattgtcgtttcggccagcatgaactggttctagtaccaaaatagttacactgtaaccttcttcatagt

SEQ ID NO: 4751 - DNA, 348 bp, Homo sapiens; identical to SEQ ID NO: 2240

SEQ ID NO: 4752 - DNA, 476 bp, Homo sapiens
  misc_feature (1)..(476): n=a,t,g or c
atcgttgttcggacatttatttctattattattaacacatatttgatcaaaatgtaaaatgttatgaatattgataattattaaacatgaaagatgaaaatttattgggaatgtgtcccttaataagatggatatggctctcttttccaaattattcatcgaatccgaagaaccatatgacatggttggaatgattttatataatagaattcagcctcaattctatttctatnnnnncanttttttgtagcttataaaggctaaggaatcttgttcgtatgagtaaatcaatgggaatggaagcagtttcgttacagcaatgccatttcattctttgacctgatttacatggcaaaaattactcatttttgattatcagttattaactttataagggccnccttcaattttgttgaaagcagaaaattagntaccacattatttgcaaaaggggttttaggnccaaacagttccat

SEQ ID NO: 4753 - DNA, 287 bp, Homo sapiens; identical to SEQ ID NO: 4036

SEQ ID NO: 4754 - DNA, 478 bp, Homo sapiens
gcccgtgagttttttaccatgctgctctgaccagtttgagtggcaattaccaatagatttgttttctttattctatggagatgtttttaccactgacactgttttctgattatagtctgcttcatagaaaatagcctgcataatcaaacaaggagttactttgaaattaaagtatgcctggctattaaaaatgcagattttaggtgggtaaacatcaggtaggtctgggtgggtcatgttctaggcctagaaaaatacactattagacaagttctaaagaaggcaaggagataaaggcatcaggtggtaacttctaattgaatattatatgttgatcatacataatatatactatgcctggaaattatgactgaaaagcacctattcggttagtgctcctattcatgagaacatatctccaatactaaatgagataagcctgttctaaaatcttatagccagtattttaagaaacttg

SEQ ID NO: 4755 - DNA, 278 bp, Homo sapiens; identical to SEQ ID NO: 2245

SEQ ID NO: 4756 - DNA, 348 bp, Homo sapiens
  misc_feature (1)..(348): n=a,t,g or c
agctttttcattttattgatgttcttttaatatatgtatttaggattaaactagtgttcaagtactaataatccagcaattctgaattggggctttattttttaaaaaatacaagcacagttagggaacagagatgaaattcttgtcaaacataaaaatatgaattgaattgcttctttttagatggatctttaacattgacttgaccatatggacaatgtctgcacgcagagccacaacattcacctctttgcaagtgggcaatctgtgtgagcaccacatagccagtagctggatccacatagtttagctggccagccgcgcagcgggnccgtttgcancctccag

SEQ ID NO: 4757 - DNA, 392 bp, Homo sapiens; identical to SEQ ID NO: 340

SEQ ID NO: 4758 - DNA, 330 bp, Homo sapiens
  misc_feature (1)..(330): n=a,t,g or c
ttttttaagtagcataatgacctttattaatcactgcatctggtgtttgccaaatgggagagaaacaatactcaagcagccttttgttaaggggtaacaagttatctgaatgaagatacttcagcacatttaaattatatttaaattatatcaagatagtgctataaacatttaattccaagtagcattctcaataaaataactcattgcaaaccnaattgctctctagagaagattactgggcagtctgtttcagtaataacataaagcaagaatcgaatcctctcagtaattaggtaacagattaaattttatcaattatctactatc

SEQ ID NO: 4759 - DNA, 468 bp, Homo sapiens
  misc_feature (1)..(468): n=a,t,g or c
ttccatttgaaagcaaacatttattgggctcctgttacacattaggactggagatacagtattaaaacaagtacctgttcatgaaacttacattctaatgggaaaagatcattgattaatatacaacaggtagtgataagtgctatgaaaataatgcacttataaaaagaataaagaatgacagcagatggggtatgaatgtgggggcatatggcctattttagaaagcatagtcagggaatgtgtctctcatcagatgatatttgaggagagacctgcaggaagtgagccagccagccatgaggttgtgctattggacaagagttgcaggaagaaggcagtgggtgtgctggtgctggctttgcattttgttcctgatggcatgcatctcttccccaaactcctggtattccagtgaaaggccaatttagtgggccccaaaaatagccctnggatgaggngtttttt

SEQ ID NO: 4760 - DNA, 424 bp, Homo sapiens
  misc_feature (1)..(424): n=a,t,g or c
caaaagaaaaattctattctttttattcagtttttaaacataccagcgagaatcaaaattgtcaaattttccaatggcaatttctccacaccagaaagtggttgtgactctcaaagaagtaacaatttggggttttcctgccttcaaaatgttatcaaatcctgtatttctcacaggcttttgaaacacacagaaagtaagaaatattccaatgaatgaaacgtaccaaatgtcagtaatacgcaagacacattcctttggggaaatggctgttaggaaaaaaatccagtctgtacatgcaaaataagcaaggaaattcagtctttctttcttcttcttcttgaaaaatccgttactcctaanatatcattccaccaaaattggaagtgaaagactaaaagggtcaggaaaggggaaggagagg

SEQ ID NO: 4761 - DNA, 441 bp, Homo sapiens; identical to SEQ ID NO: 3630
  misc_feature (1)..(441): n=a,t,g or c

SEQ ID NO: 4762 - DNA, 565 bp, Homo sapiens; identical to SEQ ID NO: 2575
  misc_feature (1)..(565): n=a,t,g or c

SEQ ID NO: 4763 - DNA, 246 bp, Homo sapiens; identical to SEQ ID NO: 2253
  misc_feature (1)..(246): n=a,t,g or c

SEQ ID NO: 4764 - DNA, 389 bp, Homo sapiens
  misc_feature (1)..(389): n=a,t,g or c
ttaattaataggagatttatttatgcaagaatagtcatccttgccgaacttagtaggagatgttaaattttctgtccagttttccttcctggataagtctttcctttctgtccctgtctgttttgaaaacataataccagaagatgaggggcccaaaccctgccacagctcctaaaagtgagttcttgggagtgggcctgaaattaggataaatatttgctgatcttgcataggtccagcgaatcaaggcaggatcctcgatgtgcgacacgcgtttgggggtcgttgtactgaagcagatactcccgtttaagccgggcccttatgctcaagcgctcgacctncgcccttctggtctccggagacacgtcatactcggcaggggtcga

SEQ ID NO: 4765 - DNA, 538 bp, Homo sapiens
  misc_feature (1)..(538): n=a,t,g or c
ttgctggcccagcttctacattttatttataaaaacaaccagtgagtctgctagagggtttgttttccataagcgccccagatacagttcacttcgtttcacgaagttctttcttcagatgtcacctcaccagcctatagggaagggccaccaaagtatcccatccctctcctccctgttatcctgccctgctcttcttcataggtattataattcgccatttgtctgtgtgtgtatttagtgtgtatccctctccacacaagaatgatgttaggtgcacagtaggtgaccagtgaagaattgttatgaatgaattactcagggcctggtttaaccgggtgccattctgaaagcagtccacatctcctcaccctacccggtccctcactttagtgaggaaggagtcttgagatgtactgagcctccccgatntctccctggcctacagttttgggctcaacatggcacaanggtgaangggattaggacattctattcacctggtaggaccatcntgtcangggagaaattttgggct

SEQ ID NO: 4766 - DNA, 441 bp, Homo sapiens; identical to SEQ ID NO: 2578
  misc_feature (1)..(441): n=a,t,g or c

SEQ ID NO: 4767 - DNA, 561 bp, Homo sapiens; identical to SEQ ID NO: 4038
  misc_feature (1)..(561): n=a,t,g or c

SEQ ID NO: 4768 - DNA, 425 bp, Homo sapiens
ttttttttggttttgttttcattttataactataaattcaagcttagggaagcttgtttttgtcctggaaaacaaaacaaagactaaacaaagcttttttgttgttattatttgcaaacctgacctcatttagaaagagatgtaactgcatggctagaacacagcttctagcatgaatgatgcaggtgactggtggtactaagaggagacaatgaactgttgacaagattataatctgctggtggcattgctgaaaaaaagcccttgcaaatttctaaacaacagtaaactctgttaggaatctctaaagtgtcttacaggccaaaaagggaacaaggttagtaaaatgccccaacagagtttggagtaaaatactggatttgagagttactggaattgggtatgtaaaaatagggttgtaggta

SEQ ID NO: 4769 - DNA, 414 bp, Homo sapiens
taaacaataatctataacagttttactatctaaggattttcactccaagaagaaaaaatacatagtaacgccaagcttgcaggacgatgacttaacagatacattttctcttaatggaaacttatctagcttcagtaatatttctggatgtagcatcaagttgctgttgcacatttttaaaagactggtccagcagtgtttcctcttcatttaaagtattggcaatagcatcattacatggattgtccagaatgtcttcgtttaatccatttgactcctccttttgatcctcatcagtattaacctcttcaaccgtgtgtgccctgggtgtattcattaacatatcatttcctagggtctgactattactcagcagctttgcctgccttctttccaaggccagttggtttattg

SEQ ID NO: 4770 - DNA, 383 bp, Homo sapiens
  misc_feature (1)..(383): n=a,t,g or c
gcaacaacttcaacagacagctgagccacgccatgccacgggctgccacggncaccacggggaaccatgtcactggactttagatgacaaaatgctgtcaggaagatgcttgctctgaccttgggggccagaacccgagagaaggactgatcctgtcgccttcttaaagagttggtggcagcaacttctgagaacttgacaccagaaacatcaacagcctccacaccacgtagtttctgattccatctttaaaaaatcttgtgttgttttgtcgagaaattgcaggcttttatgttttcaaagaactaaacacaatactgagaagtccaacttttagccagaatacataaattcctgaaaatgtatagatttgaaaaataaag

SEQ ID NO: 4771 - DNA, 421 bp, Homo sapiens
  misc_feature (1)..(421): n=a,t,g or c
attagaaaaaaaaacttctttaatgggaaattttacgattgaaatgatgtttcatcttatagaccacaaacaaatgtttttagacattgaaaagtggttaaagaccaactgcgcccagtcccccaagtgccattttctgagtgcagaatggagggtgacgtcttgagctgatgctgtgtccccagcatcaggttttctgttttccctcttctccctttattccttccttgtccattgccctcaaccttctttttctgtttgctctggcctggttcagtataacatatccatgaactctagtatgggcctacggacaatcatagctacaatcagactttctaagcaaatggggaatgtggatntacatataaccattagaaaccctatcatcacctcctagaggggaagtgaatttcttaat

SEQ ID NO: 4772 - DNA, 279 bp, Homo sapiens; identical to SEQ ID NO: 2582
  misc_feature (1)..(279): n=a,t,g or c

SEQ ID NO: 4773 - DNA, 337 bp, Homo sapiens
ttttttttttttttatctttaaaaacagatttaatgtgttaaaaaaaaatagaatcaagtggtgtgcttcgccactgagatgattgtgctgtggctccggggccacatagcaccagggctcgatagcagacaggagtttcggccctcgtccagtgcatgtgactggtgcaggggcggaggcaagccgcacgggggccagagcaggaacacagccacctgttccaacaggcgctgtgccttgtatgccccgtacatgtgcctgccctgagaggagcatgggccaggcctctcttccagctgtgcccccagggtgccagtgaggcagggcgacctctca

SEQ ID NO: 4774 - DNA, 563 bp, Homo sapiens; identical to SEQ ID NO: 3635
  misc_feature (1)..(563): n=a,t,g or c

SEQ ID NO: 4775 - DNA, 244 bp, Homo sapiens
  misc_feature (1)..(244): n=a,t,g or c
ttttttaatgcacaaaggttttaataccttggctttaatgatttttcaaggttaagaaacaaattcaaattggttggagcttcaactcagtaattacaatcacaatgcatctctganaggccctgcatttggaggcagagtaatctgcaaagatgatngtttttacatatgtcctgttacctacaccaatataattacnacattgtcttataaagacaaacagttgcttcaaactctttaaaag

SEQ ID NO: 4776 - DNA, 572 bp, Homo sapiens
  misc_feature (1)..(572): n=a,t,g or c
tttttttttttcccaagtcagagattttattgaaaaaaaaaaattacagtacttaaaaattcaaacaaggacgattcagggttgaaagaaagaaaacccgaagagtccattgtcttcagtaaagttttaaatacaaaaaacatagaccagaaaaacagcttatggcctaatgcactagttccatgataaacacacatatatagtatgtctccatcaagtgaaacttcatcacctttttacaatttagagagggaaagcagcttttagtatggttaagccatgtatcatcaataccatgaagctagcctatcagttgtaatagcttctataaaataccacagtgagattgcaataagcctagaaaatgggctacaaatcccagctatgctcaagcaagcagtgaaccaaaaataaaaataggtaaaactgaaccaagaactagataggcttctctagattctgattgataaggcaagttctaggccaggttttaaagtggcttattcagatctaaagacgtctttaccgattaacnaagcatttgtattcngaaaaaaactgantttcctcca

SEQ ID NO: 4777 - DNA, 430 bp, Homo sapiens
taaagaataatttttattatttgttcatagccaaagtgtaagggttttctaatctacccccaaaaagaatttgttgatctaccatgtaaaaatcttatctgtattgtacaaaaactcaatgcattttaatacagttttgatgttaatttgactttgttagtatgtttttgtagtcgaaggccatgggtcttatatctaagaaggaagacactttggatatttatttataataattttgttccattctctttcttgtctgctctctttttcctgcttaaagtatgatgtgtcacaactataataaggcaaatgattcctatcaaacccattgctggttaaaactcctttcaatataagataatctctggcaggtacaggatcagaattgggggggaataaaccagaagcgcctgggcaatggttagataca

SEQ ID NO: 4778 - DNA, 355 bp, Homo sapiens
  misc_feature (1)..(355): n=a,t,g or c
cccaatgatctgaaagttaattttttattagatgctctagaattcttgactattagtatttaaagaagcctaagtataaaagtcaactcataaattacttcgacatacagcttctgaattgcaatctcaaaagacagaaataaccgagagttggctataaaaattataaatggaactaaaaatttaaacaataaaatgatcaaagaatggtttgatctacaattcctaaacaacctgatcaaagtacaaaggataagcaaagtaatgtttttttgaagttcaaagttgaaaagtagaaagtcgngacacaaggagntaataaaanatctaacccnttgaccagggaaaagtttac

SEQ ID NO: 4779 - DNA, 459 bp, Homo sapiens; identical to SEQ ID NO: 2585
  misc_feature (1)..(459): n=a,t,g or c

SEQ ID NO: 4780 - DNA, 466 bp, Homo sapiens
  misc_feature (1)..(466): n=a,t,g or c
ccaaagtagatcctttattcaaaatctgtgggggttttttgactgtttttgctgacctgtgacctctcactgaggacggcagtcaggaccacccccagaggttcaaagacctccgaaaccagagaccacccccacatacaggtccatggagagggcctggaccatctggacccccacggtcaggccaagtcccagataatagcaccagatgtttcctgtccgacttttggtctccccaaggcgaccagaggccgagctgcccctacacangcgcaaggccgaggcagggcgcanacangcatctcaggtgtccatctcgccggcggggncccagcggaccctcggggcccagagtcagagancggagatgagcgagcgcagggagtctggctggaggcactcagaggcngtagcccgcgagaaccctcagcctgggggtccccggggangcagggcaaggcagcct

SEQ ID NO: 4781 - DNA, 258 bp, Homo sapiens; identical to SEQ ID NO: 3638
  misc_feature (1)..(258): n=a,t,g or c

SEQ ID NO: 4782 - DNA, 460 bp, Homo sapiens
gagataattataaatgctccttttgctttttattaaaatgtcacagcatgcctagagaacagtttatatggctgcataaagtctgaaacacaagaaaactaataaaaaaccacctgttaaatacacaattatgattaatgatgtcccttcaattaaatcttgtgtgtttaaaatgaaaaacacgcagcctggtacaaatatccatatttcaatttgcgatctgctgcattggcatgagttttggtgaaactgcaaaatcacacccagtactcttctgtacgtcatccactgtcaggccttcccagagctcaatcagagtcaaccctttcttcttgtccacatcaaacacagccttttcagtaataatgcggttgacacattgctttccagtcaatggtaatgtacatttctccatgattttatgtgcatttccctttgcagaatgctccatggtgaccac

SEQ ID NO: 4783 - DNA, 394 bp, Homo sapiens
caggctgggaatgtcactttatttggatttggttcgtggggtgggggtctcagaacaaactagaaggccttacataggcagctgggcccagccagctggcgtcctgacccaggacttcattctggcctgtccccccaaagcatagcctccaccttctcacccttctccagaggagtctcctccacccccacaggagctgtggacaggccctgcagccctagggaaggaggaagggtcctgcaagtagacactaaggcacagcgtggcccaggggtcataagggctcttctggcggtggcatctgctggggcttccagctgggcgggggctccacgcaaccactgaccatccagaagtagtttgggtgcacctggccctgcacggcctcgctaac

SEQ ID NO: 4784 - DNA, 459 bp, Homo sapiens
ttttttttcacacagaatggaataaaactttattctttttaaattccacacataaacgagatgctgaaaaagcccttgccatctctgacagaaaagcagagcagctctgtttcatgaacgacagcacaattaaagctaaaataatataaaaataattcgaaaaaatcccttttactgtacactctcaaagcaagaaagagaaacaacagttttgttttgtttttttctgctagccagaaaatgtgtttctattcatttgggctttgaagttcagtgtaccccacatctgtgtgtctgtgtgtgtatgcgtggctatgtgcgtgtaatctatgcagtgtggaagcccctaatcttttcatctagtttgcctaatcattaagctacttaaccaattataatactattatgtcacattgaacaactttacataattgcttctttgaaatactagaaacattg

SEQ ID NO: 4785 - DNA, 297 bp, Homo sapiens; identical to SEQ ID NO: 2598

SEQ ID NO: 4786 - DNA, 203 bp, Homo sapiens; identical to SEQ ID NO: 370
  misc_feature (1)..(203): n=a,t,g or c

SEQ ID NO: 4787 - DNA, 354 bp, Homo sapiens; identical to SEQ ID NO: 396

SEQ ID NO: 4788 - DNA, 416 bp, Homo sapiens
ctttgggttttgttttgattctgtttgacccacttaactaaaatgatactatagatccttcaaaagcagaatcatgccagttacacatctcaaatcctttgatctacttacttcgtactttaagaggtaaatttgagaatgaaaatgggagactccaatgcaataacacctacataaggaaaaacacacataaacacccacacatattccccagcctcaaaactaaagcaaggtacacatttacatttccaaaccccaaagcctaaactgtccaggaaaagattctagctttgtgggctgagtttattttgcttctggttataaacaaatgtagtgtatacacacatctgtccaagaaatcttgcacaaggtggattttacatggggtatcatgcacaagattaaaaacaagacca

SEQ ID NO: 4789 - DNA, 136 bp, Homo sapiens
gatccctgtagaggtggtattaaagatggtcactgagattaagaagattcctggtatttctcgaattatgtatgacttaacatcaaagcccccaggaactactgagtgggagtaataaacttcttgttctattaaa

SEQ ID NO: 4790 - DNA, 442 bp, Homo sapiens
  misc_feature (1)..(442): n=a,t,g or c
ttttattcttgacatgggaaaattttatgaaattcaaattttagtgtccataaataaagttttattggaacacagaatatgtaatatattcattggtttatgtatttgtctgtatgcctacatctgatatgcaaaactatgaaatattcatacatataaaaggcaggtcaaaaatacaactataaaaaatttataagtaatttacttttagccctttggagaatttatttaacaattaacacatggctaccactacaattttttttatttttttgagtcaagagttactttattgcccaggctggagtgcagtgattgggtgtgattgtggctcaccgtaacctcaaactcctggggcccaaaggaatcctcctgcctcagcctcacaagtaggctgagaccacagggcatntgccaccatacccagctaagnttaaatttt

SEQ ID NO: 4791 - DNA, 310 bp, Homo sapiens
tttttgaaggcttaagcaatcggggacgagctttattgaggcaatcacatccacatttcagttgtttgcaatgattggcaaacggatgagttaaaaaagccttctgcttccacactgttccgtctacattcagaaagcagtaaaaatatattcgtgcaatgaacactttccaccttaagcgtatcatgacagttcacaaatttgccaacagacaatgcaaaacaatatttacaagatagaccctttgtaagttccaaatttagatacttgtggtgtaattctaaaactaacatcgcatgtttttccaggt

SEQ ID NO: 4792 - DNA, 447 bp, Homo sapiens
  misc_feature (1)..(447): n=a,t,g or c
ttcggttctcagtgttggaaagtaatatggtaaaacttctcttctccgaggacaatagaatagtatttgttgtatagactgaaccatcctccaaaatttggaagtcaggatcacttgaatgaattagatttgcagctgtaaagcactctttcaggttaactctaccaacaagtttctcggcatctagtttggagggaacatgtaatgtcacatttttgcaggcatcactggcaaatattaagatcgcgagggtcagcaggagcagccggcagagggctccgttccaggagccggacgggcggngctgcctccatggagagggctcggggcaggtcgcgggccgancgtcgggccgggggttaggagggctccgcggggcgagggccgcgncggaagcgcagtctgggcccgctgctcaggaggaacgcgaagcganggaggttgggg

SEQ ID NO: 4793 - DNA, 450 bp, Homo sapiens
aaatcttaaggatgctattgaagggttttttgataaagtagccaacagcaccaaaaaataacagaatggatttcctaatgaaatcaggcacaggtctccctcatgtgacccctccaaggcaggcagtcttttccgtcttcctcgctcgcttttcttctttcctggaacagatgcatagtgatgtgctggtggagagcccactcgctcccgtctcctcgttccacctatggttaggaaacaacgtccgccttcagctgccacaaccgcccagagaaacaaaacgggggtgccccggcttcccagatcacaagctcatctggcacacggcagaagacgacagccaaagcaaagccatttcaagtttcgtgtgtgtgtgtgtgtgtgcgcgtgtgtctcctatcccttctaaaaaatctggctcacatgactgatggtttttaaatttgttct

SEQ ID NO: 4794 - DNA, 441 bp, Homo sapiens; identical to SEQ ID NO: 1164

SEQ ID NO: 4795 - DNA, 328 bp, Homo sapiens; identical to SEQ ID NO: 485
  misc_feature (1)..(328): n=a,t,g or c

SEQ ID NO: 4796 - DNA, 358 bp, Homo sapiens; identical to SEQ ID NO: 3672

SEQ ID NO: 4797 - DNA, 463 bp, Homo sapiens; identical to SEQ ID NO: 4096

SEQ ID NO: 4798 - DNA, 479 bp, Homo sapiens; identical to SEQ ID NO: 2335
  misc_feature (1)..(479): n=a,t,g or c

SEQ ID NO: 4799 - DNA, 401 bp, Homo sapiens
gtgatttccaaggcctttattttatagggaagaggaataaaagatcaatgctagtgggtgtttcgtcatgagcccaaagcccgttgggagtctctgcgaggtcatttgccctttagattctgcaaaggcaaaaagaaatcgatactgatttttaaaaatatatcttaggagccctggtctcctgctgattccatggatgcctggagcacttgtatctggagaatggagacaatatcaccccaagcccgaattcatttgatgagactactatgtataaaacagttaattatatacataaataacataaaataattctcataaattaaaagtcaaatgatctcccactattcattcaactgagaggtgagagctaggcgcgagtgatggtgggtaaggtgcct

SEQ ID NO: 4800 - DNA, 410 bp, Homo sapiens
caatcccgctgaagaattggaacatagttatattggctggaggtttggacattcctagagcaatacatatgcctttcaactcttgaaagacctcactaccgcctccttcttgagctttttttggaggagcattcacacagagcattctggcagcttctagttctgagatgaggtatgtgagcaagaggaggcagttcttctgaatgagaaggcgcttggtcacatccccagatgtcagtgaaagatacgggcagttcatctcccctagtagcccactcacctcaagctggaattcttcagcttcactcggactgttagttgcttgcacgttttcctctagtttacagagcactcttaattcagacaccagccaagcacagagttttggtaaactcgggggaactggctcc

SEQ ID NO: 4801 - DNA, 417 bp, Homo sapiens; identical to SEQ ID NO: 4102
  misc_feature (1)..(417): n=a,t,g or c

SEQ ID NO: 4802 - DNA, 115 bp, Homo sapiens
aaaatgtggaactagtattcattttttattcaaatattttataaattatcatattggaggccctatagtgtggtagtttacagcatgaactctgtattccaagtgctcacgttcc

SEQ ID NO: 4803 - DNA, 415 bp, Homo sapiens
tgtatgtttcaacaagaaaaactactgtttattttttatgtcaatattgtagttacattttcagaatcacatgctgtgggaaaaaatcagcaagcagaaggtttataataaaccaaaagatttatttataacattttctgaattcacttaaaaaacaaaaaggaatcccccttccctcaaaatagaaccgtttcctacagattccatccagtatgacttttcagatatctaaggagattttgctacacttattacaatggtagttttcccacagtgtaattctctgatataggtttgaaatattgcagaaagtcactctacattcatttatacagttgctttttctcctacaagagtattaaaatttaagtattgcattgtaaatggaaggcattcccaaatcactggtggtttg

SEQ ID NO: 4804 - DNA, 459 bp, Homo sapiens; identical to SEQ ID NO: 3676
  misc_feature (1)..(459): n=a,t,g or c

SEQ ID NO: 4805 - DNA, 397 bp, Homo sapiens
  misc_feature (1)..(397): n=a,t,g or c
ttttttttttttttttcatagatatgattattttatttataaagctagttaagcacaccggagataaatgatttcacttatgaaatgttttcttatcctgcagttatatgatacaggatttaaaggaagagcaagttncctaagtctataaactccagagcaccctctagtggacttgagggtgggaaataatttcactgaagatgaaaaccctaccacaattcagacttgaacatttcaggacagattgggaggttaaactgaagacaatgaacaattcttctctacctacaaaaagactgcaattgtgttaccttttagacttacaattctgaacggcctataacttaccaaaccaattnggccttttaaaaaagggtacttggcttcccccccn

SEQ ID NO: 4806 - DNA, 478 bp, Homo sapiens; identical to SEQ ID NO: 3046

SEQ ID NO: 4807 - DNA, 533 bp, Homo sapiens
tatgtcactattttattgatgatgtgttttatagaatcacaaaatttagaaacataagaaggatttaggtatcacctaaattcaaagaaatgtgtgtttctaggttgctaaattcaaagaaaaagtatgatttggtttggttcatttaaaacaggtcacaaacagaattatatttcaaatttagaagatacggtattaagtgattcatcttattttggacatttttcctcaaggagaatttttctggaagaaaaagtacatttatatgtgggcttattaagagaaagagagaaaggcatgctattttaatcattaaattcttgatgatgacgatcatcatcaagatgagaaagaaaagaaatatgagccaagagaatctgttgttgccagcaatcagtttaccagaacatctgcaggtgaacattttccaaatggagtgacagactaattgcatctacggggatgagaatctgccatagagaggatgctgtgggcttattttgcttatgtagataggaagggtgatacatgga

SEQ ID NO: 4808 - DNA, 348 bp, Homo sapiens; identical to SEQ ID NO: 2681

SEQ ID NO: 4809 - DNA, 413 bp, Homo sapiens; identical to SEQ ID NO: 40

SEQ ID NO: 4810 - DNA, 365 bp, Homo sapiens
ttgtcggttaatttacactttatttttttaaaaagttgatttaaaaaagaaacaacacaagtttagaatccataaaatgtcagcaatgctgatgtgcactggactgaaacatcttgatcatcttctgatagaagtaatattccatacaaaaagattcttagattccattttttgcttcattattgtttgtggcttgctttctttgagcaataaaggggtacatacacttgtccgctcctaggaaccgatacatgcacacaactgcttcaaatggtaggatgctcttcatgaaggtcacgatgtacatgaggcggggagtgcagatcatgggctggtcagtgaggatggccttcatggcctgcttt

SEQ ID NO: 4811 - DNA, 419 bp, Homo sapiens; identical to SEQ ID NO: 1399
  misc_feature (1)..(419): n=a,t,g or c

SEQ ID NO: 4812 - DNA, 195 bp, Homo sapiens; identical to SEQ ID NO: 1182
  misc_feature (1)..(195): n=a,t,g or c

SEQ ID NO: 4813 - DNA, 316 bp, Homo sapiens
  misc_feature (1)..(316): n=a,t,g or c
catcttattgcctttattctgctgtnggcccagctggccccattgtagggcacagggccaagcttttacacgctcacccatgctctctgtgcaggccagtgcgtgcacacacacacgcgcgcgcgggcacgannacacacatacacactcacacatcccatctntggctctgagagtcagtctntggggggcaaagggcaactcctcagcctgcccctgcctgcccttttatgacagcaccaagggcgggggtggggacagggccctcagcccccagaacaaatccctgtgcaaactngaggtgcaagctgggctt

SEQ ID NO: 4814 - DNA, 34641 bp, Homo sapiens; identical to SEQ ID NO: 4137

SEQ ID NO: 4815 - DNA, 836 bp, Homo sapiens; identical to SEQ ID NO: 970

SEQ ID NO: 4816 - DNA, 3406 bp, Homo sapiens
ctgtagtggcggagaggatcgtggtactgctatggcggaatcatcggaatccttcaccatggcatccagcccggcccagcgtcggcgaggcaatgatcctctcacctccagccctggccgaagctcccggcgtactgatgccctcacctccagccctggccgtgaccttccaccatttgaggatgagtccgaggggctcctaggcacagaggggcccctggaggaagaagaggatggagaggagctcattggagatggcatggaaagggactaccgcgccatcccagagctggacgcctatgaggccgagggactggctctggatgatgaggacgtagaggagctgacggccagtcagagggaggcagcagagcgggccatgcggcagcgtgaccgggaggctggccggggcctgggccgcatgcgccgtgggctcctgtatgacagcgatgaggaggacgaggagcgccctgcccgcaagcgccgccaggtggagcgggccacggaggacggcgaggaggacgaggagatgattgagagcatcgagaacctggaggatctcaaaggccactctgtgcgcgagtgggtgagcatggcgggcccccggctggagatccaccaccgcttcaagaacttcctgcgcactcacgtcgacagccacggccacaacgtcttcaaggagcgcatcagcgacatgtgcaaagagaaccgtgagagcctggtggtgaactatgaggacttggcagccagggagcacgtgctggcctacttcctgcctgaggcaccggcggagctgctgcagatctttgatgaggctgccctggaggtggtactggccatgtaccccaagtacgaccgcatcaccaaccacatccatgtccgcatctcccacctgcctctggtggaggagctgcgctcgctgaggcagctgcatctgaaccagctgatccgcaccagtggggtggtgaccagctgcactggcgtcctgccccagctcagcatggtcaagtacaactgcaacaagtgcaatttcgtcctgggtcctttctgccagtcccagaaccaggaggtgaaaccaggctcctgtcctgagtgccagtcggccggcccctttgaggtcaacatggaggagaccatctatcagaactaccagcgtatccgaatccaggagagtccaggcaaagtggcggctggccggctgccccgctccaaggacgccattctcctcgcagatctggtggacagctgcaagccaggagacgagatagagctgactggcatctatcacaacaactatgatggctccctcaacactgccaatggcttccctgtctttgccactgtcatcctagccaaccacgtggccaagaaggacaacaaggttgctgtaggggaactgaccgatgaagatgtgaagatgatcactagcctctccaaggatcagcagatcggagagaagatctttgccagcattgctccttccatctatggtcatgaagacatcaagagaggcctggctctggccctgttcggaggggagcccaaaaacccaggtggcaagcacaaggtacgtggtgatatcaacgtgctcttgtgcggagaccctggcacagcgaagtcgcagtttctcaagtatattgagaaagtgtccagccgagccatcttcaccactggccagggggcgtcggctgtgggcctcacggcgtatgtccagcggcaccctgtcagcagggagtggaccttggaggctggggccctggttctggctgaccgaggagtgtgtctcattgatgaatttgacaagatgaatgaccaggacagaaccagcatccatgaggccatggagcaacagagcatctccatctcgaaggctggcatcgtcacctccctgcaggctcgctgcacggtcattgctgccgccaaccccataggagggcgctacgacccctcgctgactttctctgagaacgtggacctcacagagcccatcatctcacgctttgacatcctgtgtgtggtgagggacaccgtggacccagtccaggacgagatgctggcccgcttcgtggtgggcagccacgtcagacaccaccccagcaacaaggaggaggaggggctggccaatggcagcgctgctgagcccgccatgcccaacacgtatggcgtggagcccctgccccaggaggtcctgaagaagtacatcatctacgccaaggagagggtccacccgaagctcaaccagatggaccaggacaaggtggccaagatgtacagtgacctgaggaaagaatctatggcgacaggcagcatccccattacggtgcggcacatcgagtccatgatccgcatggcggaggcccacgcgcgcatccatctgcgggactatgtgatcgaagacgacgtcaacatggccatccgcgtgatgctggagagcttcatagacacacagaagttcagcgtcatgcgcagcatgcgcaagacttttgcccgctacctttcattccggcgtgacaacaatgagctgttgctcttcatactgaagcagttagtggcagagcaggtgacatatcagcgcaaccgctttggggcccagcaggacactattgaggtccctgagaaggacttggtggataaggctcgtcagatcaacatccacaacctctctgcattttatgacagtgagctcttcaggatgaacaagttcagccacgacctgaaaaggaaaatgatcctgcagcagttctgaggccctatgccatccataaggattccttgggattctggtttggggtggtcagtgccctctgtgctttatggacacaaaaccagagcacttgatgaactcggggtactagggtcagggcttatagcaggatgtctggctgcacctggcatgactgtttgtttctccaagcctgctttgtgcttctcacctttgggtgggatgccttgccagtgtgtcttacttggttgctgaacatcttgccacctccgagtgctttgtctccactcagtaccttggatcagagctgctgagttcaggatgcctgcgtgtggtttaggtgttagccttcttacatggatgtcaggagagctgctgccctcttggcgtgagttgcgtattcaggctgcttttgctgcctttggccagagagctggttgaagatgtttgtaatcgttttcagtctcctgcaggtttctgtgcccctgtggtggaagagggcacgacagtgccagcgcagcgttctgggctcctcagtcgcaggggtgggatgtgagtcatgcggattatccactcgccacagttatcagctgccattgctccctgtctgtttccccactctcttatttgtgcattcggtttggtttctgtagttttaatttttaataaagttgaataaaatat

SEQ ID NO: 4817 - DNA, 6586 bp, Homo sapiens; identical to SEQ ID NO: 4142

SEQ ID NO: 4818 - DNA, 4468 bp, Homo sapiens
gcagcggcaaccccggcgccgcggcaaggactcggagggctgagacgcggcggcggcggcgcggggagcgcggggcgcggcggccggagccccgggcccgccatgggcctccccgagccgggccctctccggcttctggcgctgctgctgctgctgctgctgctgctgctgctgcggctccagcatcttgcggcggcagcggctgatccgctgctcggcggccaagggccggccaaggagtgcgaaaaggaccaattccagtgccggaacgagcgctgcatcccctctgtgtggagatgcgacgaggacgatgactgcttagaccacagcgacgaggacgactgccccaagaagacctgtgcagacagtgacttcacctgtgacaacggccactgcatccacgaacggtggaagtgtgacggcgaggaggagtgtcctgatggctccgatgagtccgaggccacttgcaccaagcaggtgtgtcctgcagagaagctgagctgtggacccaccagccacaagtgtgtacctgcctcgtggcgctgcgacggggagaaggactgcgagggtggagcggatgaggccggctgtgctaccttgtgcgccccgcacgagttccagtgcggcaaccgctcgtgcctggccgccgtgttcgtgtgcgacggcgatgacgactgtggtgacggcagcgatgagcgcggctgtgcagacccggcctgcgggccccgcgagttccgctgcggcggcgatggcggcggcgcctgcatcccggagcgctgggtctgcgaccgccagtttgactgcgaggaccgctcggacgaggcagccgagctctgcggccgcccgggccccggggccacgtccgcgcccgccgcctgcgccaccgtctcccagttcgcctgccgcagcggcgagtgcgtgcacctgggctggcgctgcgacggcgaccgcgactgcaaagacaaatcggacgaggccgactgcccactgggcacctgccgtggggacgagttccagtgtggggatgggacatgtgtccttgcaatcaagcactgcaaccaggagcaggactgtccagatgggagtgatgaagctggctgcctacaggggctgaacgagtgtctgcacaacaatggcggctgctcacacatctgcactgacctcaagattggctttgaatgcacgtgcccagcaggcttccagctcctggaccagaagacctgtggcgacattgatgagtgcaaggacccagatgcctgcagccagatctgtgtcaattacaagggctattttaagtgtgagtgctaccctggctacgagatggacctactgaccaagaactgcaaggctgctggtggaaagagcccatccctaatcttcaccaaccggtacgaggtgcggaggatcgacctggtgaagcggaactattcacgcctcatccccatgctcaagaatgtcgtggcactagatgtggaagttgccaccaatcgcatctactggtgtgacctctcctaccgtaagatctatagcgcctacatggacaaggccagtgacccgaaagagcaggaggtcctcattgacgagcagttgcactctccagagggcctggcagtggactgggtccacaagcacatctactggactgactcgggcaataagaccatctcagtggccacagttgatggtggccgccgacgcactctcttcagccgtaacctcagtgaaccccgggccatcgctgttgaccccctgcgagggttcatgtattggtctgactggggggaccaggccaagattgagaaatctgggctcaacggtgtggaccggcaaacactggtgtcagacaatattgaatggcccaacggaatcaccctggatctgctgagccagcgcttgtactgggtagactccaagctacaccaactgtccagcattgacttcagtggaggcaacagaaagacgctgatctcctccactgacttcctgagccacccttttgggatagctgtgtttgaggacaaggtgttctggacagacctggagaacgaggccattttcagtgcaaatcggctcaatggcctggaaatctccatcctggctgagaacctcaacaacccacatgacattgtcatcttccatgagctgaagcagccaagagctccagatgcctgtgagctgagtgtccagcctaatggaggctgtgaatacctgtgccttcctgctcctcagatctccagccactctcccaagtacacatgtgcctgtcctgacacaatgtggctgggtccagacatgaagaggtgctaccgagcacctcaatctacctcaactacgacgttagcttctaccatgacgaggacagtacctgccaccacaagagcccccgggaccaccgtccacagatccacctaccagaaccacagcacagagacaccaagcctgacagctgcagtcccaagctcagttagtgtccccagggctcccagcatcagcccgtctaccctaagccctgcaaccagcaaccactcccagcactatgcaaatgaagacagtaagatgggctcaacagtcactgccgctgttatcgggatcatcgtgcccatagtggtgatagccctcctgtgcatgagtggatacctgatctggagaaactggaagcggaagaacaccaaaagcatgaattttgacaacccagtctacaggaaaacaacagaagaagaagatgaagatgagctccatatagggagaactgctcagattggccatgtctatcctgcagcaatcagcagctttgatcgcccactgtgggcagagccctgtcttggggagaccagagaaccggaagacccagcccctgccctcaaggagctttttgtcttgccgggggaaccaaggtcacagctgcaccaactcccgaagaaccctctttccgagctgcctgtcgtcaaatccaagcgagtggcattaagccttgaagatgatggactaccctgaggatgggatcacccccttcgtgcctcatggaattcagtcccatgcactacactctggatggtgtatgactggatgaatgggtttctatatatgggtctgtgtgagtgtatgtgtgtgtgtgattttttttttaaatttatgttgcggaaaggtaaccacaaagttatgatgaactgcaaacatccaaaggatgtgagagtttttctatgtataatgttttatacactttttaactggttgcactacccatgaggaattcgtggaatggctactgctgactaacatgatgcacataaccaaatgggggccaatggcacagtaccttactcatcatttaaaaactatatttacagaagatgtttggttgctgggggggcttttttgggttttggggcatttgttttttgtaaataagatgattatgctttgtggctatccatcaacataagtaaaaaaaaaaaaaaaacacttcaactccctcccccatttagattatttattaacatattttaaaaatcagatgagttctataaataatttagagaagtgagagtatttatttttggcatgtttggcccaccacacagactctgtgtgtgtatgtgtgtgtttatatgtgtatgtgtgtgacaggaaaatctgtagagaagaggcacatctatggctactgttcaaatacataaagataaatttattttcacacagtccacaaggggtatatcttgtagttttcagaaaagcctttggaaatctggatcaggaaatagataccatggtttgtgcaattatgtagtaaaaaaggcaaatcttttcacctctggctattcctgagaccccaggaagtcaggaaaagcctttcagctcacccatggctgctgtgactcctaccagggctttcttggctttggcgaaggtcagtgtacagacattccatggtaccagagtgctcagaaagtcaagataggatatgcctcaccctcagctactccttgttttaaagttcagctctttgagtaacttcttcaatttctttcaggacacttgggttgaattcagtaagtttcctctgaagcaccctgaagggtgccatccttacagagctaagtggagacgtttccagatcagcccaagtttactatagagactggcccaggcactgaatgtctaggacatgctgtggatgaagataaagatggtggaataggttttatcacatctcttatttctcttttccccttactctctaccatttcctttatgtggggaaacattttaaggtaataaataggttacttaccatcatatgttcatatagatgaaactaatttttggcttaagtcagaacaactggcccccaattgaagtcatatttgtggggggaaatggcatacgcaatattatattatattggatatttatgttcacacaggaatttggtttactgctttgtaaataaaagggaaaactccgggta

SEQ ID NO: 4819 - DNA, 3248 bp, Homo sapiens; identical to SEQ ID NO: 4149

SEQ ID NO: 4820 - DNA, 2538 bp, Homo sapiens
attttctctctatttctccctaggtcaccaagatgctggcagtggttgtaattctgtttgcccttttatggatgccctacaggactctagtggttgtcaactcatttctctccagtcctttccaagaaaattggtttttgctcttttgcagaatttgcatttatctcaacagtgccatcaacccggtgatttacaatctcatgtcccagaaattccgtgcagccttcagaaagctctgcaactgcaagcagaagccaacagagaaacctgctaactacagtgtggccctaaattacagcgtcatcaaggagtcagaccatttcagcacagagcttgatgatatcactgtcactgacacttacctgtctgccacaaaagtgtcttttgatgacacctgcttggcttctgaggtatcctttagccaaagttgattcatgaattagaagaaaatggatgacaaagaaaatgagaatctgtgcagtcatcaacaaaagggagaacatggccaatagtcatatgtgaagacagagcagatcagtctttgtcaatgctctaacaaattctggccctagatactttaacccatgaggatgattcagactttccttcttacaaactaatatcactaaaaatggagcagatctgtgaaatagctaaatgatggaaacttaaagtttagcccttttcatttaacttaagaaattcactatattttctggacttatagagtttcaataaaatctagacatcaatttacattattcatagtaaccttatcaaatgtcacttttcaacttccctaatttatttatacattcgataatttgacaacatgcagatttttaaatgtttgcatttagtattcattttaacatagtacagggctagttcatgaatatctgaaattaaagggaaaaatattacagaaacattttatttattgagtaaaaataagattttagacatacatgttaactgtattttaaaagttgccataatgtttataaaattctgagatgatttttatatcttagaaggtagataatcatcactcaactttaatgtaaaataaacctcaaaatatctgaaattattaattaaggagaaatgtagattttaagataaatccaactcttatcaactcttccagcctcccacatgatgggtggaaaaaggcaaaagcccagattaagtaactgtgaagatacaaactaacatacaattaaatttgaaaagtatagtcaagacaaagcaagtatttataattagattttgcttcttctctgacgcttttaagcaataaaatctttttgaacattcttgtttataaactactcagccatgtcaagcaaatcattcaagcaaaatctagctgaaaagtctgaaacattcttaaaagctttgttattctaagtcagccaaaatcctggtatccctcttccagataaagagctcccactgagaattgtagtctatggattttaccttgactgcaattgtctttccttcctatctgcttgttgtttgtaggttctttttttgtttttctcaaatgctagtgatattttgtttacagattctaaaagcaatgcaaaattctgttggctttattttcagcagagttaaaactgatttcatcatattatcagtatgtcatctttatatttatgactgacatctgctattccagtgtttattggagacttgtgaatgaatctgtccaggacacttgtcagttcctacctgaatctcttacctattgagatttggccaaccagaatctccgagggcaaaaattgcccttggtgatggttcagtagtcattgatttttaatgagtagatcaaaaaagtacccatacctttacatgcccgtaggctgtcattttccctctccagcctatatccctattttatggacttttctagaacctaatcgctaatgataattatgcctccccatcttcttaatgaagaatataccattcttctgaaacttgtttttacgtgctgtttcatggagactatgctatccagaacctcattctagagtgcgcttttttttttttgaaaattggccttatctactccagcaagacatttttatcctgttactataacagtaaatgaatgcaagcaaatatttgcaggaaataccctaaaaccctacctgcatgacagtaagcaatctatgttaactgacttttcattctggtataaatattaatcttggcatcatataaatagagcaccagagtgacccaaccccaaatcacacaagcacatgtgtgtttataaacacatacccacatgttcataaattggtgaaaaaggggattggaatatacgagattttttcattacagaaaggacctaatatcattgagcatcgactatgtctcaggtatgctggtaggtagtcaatcaacattatcttcatcacaatttcactacagctgtaatttctctgatgattagaccagtattcctgtgacctaattcctaattaataaaaagttatggattttgcagaatgatta

SEQ ID NO: 4821 - DNA, 458 bp, Homo sapiens
tccagtgtgtgtgtagcctccacagagaggtcgttttctcggagtccagaggggccgcctgagcttctgagaactagggaggagccatcccagccatgagcccctgtgggaatctgctgggggccaagtggcctggagtcctcaggctcccgcagctgctccggagggagaggtgagctcagggcagcctgcctgcagccagaggtgccgggagccccgggcctgtcatggtggccatctacagccggcctgaggcagtcacagacggatttgcagctgagcctgtctatctggtgtgggaagaagatggggagttacttgtcagtcccggcttacttcacctccagagacctgtttcggtgttcagaatgccaggattccctcaccaactggtactatgagaaggatgggaagctctactgccccaaggactactgggggaagtttggggagttctg

SEQ ID NO: 4822 - DNA, 6896 bp, Homo sapiens
catgccacatccccggggcgggagggggctacatccccggctttagacgcgcgagtctcaggtcccgctaattacctggcgggtgctgcccacccctgccctcgcgcacctagcgcgtggcagcgggaaggcggggcctgggggagccccacccctggagactgcggctggggcctccctctcctccgcccgcccgcctgccactagctcattgcgcctctcctgcagtctgattgggcaccggctcccattccggctccagcctccaatccgacccccatttcggctgcagcctcggacctagctccggccctcggtctatccggttgcatcctccctccctgttccggatcttatcttgcgccagcgcctactccaggatcccgtagccagacctcaagccatggctggtcccttctcccgtctgctgtccgcccgcccgggactcaggctcctggctttggccggagcggggtctctagccgctgggtttctgctccgaccggaacctgtacgagctgccagtgaacgacggaggctgtatcccccgaggtaacagtgcctgaggcgcgggaggaggcgggggcaggaggtgatgggaacgaaggtgcgggtagaagtgagaatccgggcaacagagaagggctataatcacgaaggccctggagctggagggctgtgcagtctgcagacctcagtggggtgggggtgggggccaaaaccataaagcaagaacattcctggggacctgccaagaccagctctggccctacgagttctagctgcactggctgcccaaatccctaattgtaaagccaggaactatccttttcgctcccctccatctccttccctcatttcctcaattcctctccttaggcttttcccctcctccatccgtagtgttgtgtcatgggaggaaagaactgagcagatctgaagaaactgagctggccagccagaggcaactagaactattaggaaagcatagactctgaaagtccctaaagagattaccaaggtttaccctctttctaattcccctcctcccgcggagcaaagccagacatggccaactggacagctcccaggtaactgcactaggtctaggcgtctgtgaccctccctccatggttactgggtaccccctccccagcgctgagtacccagacctccgaaagcacaacaactgcatggccagtcacctgaccccagcagtctatgcacggctctgcgacaagaccacacccactggttggacgctagatcagtgtatccagactggcgtggacaaccctggccaccccttcatcaagactgtgggcatggtggctggagatgaggagacctatgaggtagggggtccccagagtctccctgatgatccaattcatcttcccagtaatcccagctcctttcccttaaagacctctcactttcccccaagactctgagccccccatacttaagttttctgaaccagtgaaatcaatgcacaattgaagtctggggagggattccctctccttaaccatctctccctcttaactccccttaggtatttgctgacctgtttgaccctgtgatccaagagcgacacaatggatatgacccccggacaatgaagcacaccacggatctagatgccagtaaagtgagttcaaatatcccacttctgatttgcattgcctgtgtacaacactctgtatctccaaccccttcaccttatttcctgactcatggtcattatactgctgagcttttaatcttaatgtaaggaaagaatcatatcttaaggggcagcatatatggagatggaaggatagataagaatgaccatgacccaaggtgggtggtttggggacgggtctgcaatgcccccttcaattccagtgctttcccaaagggcctcttcttccaatgcatgcaggaagaatgcacacagagtcctctaatgcctaaggaaggtctctcctttcccaggggccctcagttcccaccgtgtttctgtgacttacattcatttcccttatctcccagatccgttctggctactttgatgagaggtatgtattgtcctctagagtcagaactggccgaagcatccgaggactcagtctgcctccagcttgcactcgagcagagcgacgagaggtggaacgtgttgtggtggatgcactgagtggcctgaagggtgacctggctggacgttactataggctcagtgagatgacagaggctgaacagcagcagcttattgatgtgagggccttaagagggtgctggttggtgggagcagatggggaaggctgggccagatgagacatgggctctgaaaggcccaggggccaccatgaagattcttaacccaagtcccgttactcttcccaggaccactttctgtttgataagcctgtgtccccgttgctgactgcagcaggaatggctcgagactggccagatgctcgtggaatttggtatgaagctgctcattacctcttttgtcttcatgccctcataaatgctttttttccctctatctctcccaattcttgccttgcctcttgatcactgtccctctccggccctcaggcacaacaatgagaagagcttcctgatctgggtgaatgaggaggatcatacacgggtgatctccatggagaagggtggtaacatgaagagagtgtttgaaagattctgccgaggcctcaaagaggttagagaagactatgtaggggagctaggtgggaggacataaggaaaaccaaagagtagcataaatagattatgtaatttaccaaccaacccaggacatgtcttatagtaaaaaggactatctaggactcactccaggactaaaggtgtaaaccagctgggaccatactgggaaaaccaggacatgtggtcacactaagattaggaaaagaaagagtgtcaggaatcttaggaagtgaacaaggcttttgacagagagtgcaaagaaggaataaatgagatggcacgtcagtgcctgggatgtgtgcagtgggatggtgaggtgtgcagataaggaaaacattcgagcttagattgatgttggcggggagaggttgctgtgttcatgactctaatataaccacccagttctgagacaaggtaggccttgactctggattctatcattcttgttaaagtttcgggtctaggctttaagttgagagttcggagagagactggggaaggtggaggatagaatggttcgagttctagaatatgtggctctagatgagaggttgaactgaatcatcaatcctacatggattgggtctccgtattcaagtctacattagaaatccccataaactcaattcaattcttactgtatgttctcaaacatacagttctattttaggtttgcaaagaaaaagagctcctcttttagattctgagaagtttctactatttttggcaagtaatagataacatattctgactatgagtgggtagggaagtacctttaaattatatgcctcagtttcctcatctgtaaaattgggataatgagattttctacattttaggttgttgtggggattaagtgaaatacaggtaaagtacttggtccacagtaagtgcttaataagtgttaaagtgttagctgcaatattattctggatggaagagtttccccccatgttcagcatgtaagatatcccctatggcatggttccttctgaactataaagaggatccctttactcatgttgggttgtggtctttgtgaccatcattctgctagatcccttgtctcttgaactctaatagtcatcttcatgactacatggttaagtgaagccaaacgccttccccccgccccctattcctatgaatctggcttttctgctctgttttcatctttctctgcattcacacaggtgctccgttcacagctaacagaatgttatcttacctcttcctggcaaagcttacaccttcatcttctgtctgaagggacccttctaagctctaggctcattagcaaagcaaagataatcgatgcatgcagacctcattgaataatcagtcatctctcagttcagtttaccacctctgttcatttccctagatcatccttaatacaccactccttcgagttttcttcttccacataagatattttttcacaatctcattattatgcacatcataattttgcatcatgcatgcatgaaaacaataacaaacctttttcatttaaaaaaagaccaatgtcattcattcacagccaagtttctgttctagacatatttctagtgttcttgtgggtctagctaagggagggtccagggttaatgaaatatccctgatttttcgttaacaaaacctttgtggactcaggtggagagacttatccaagaacgtggctgggagttcatgtggaatgagcgtttgggatacatcttgacctgtccatctaacctgggcactggacttcgggcaggagtgcacatcaaactgcccctgctaagcaaagtaaaggagttgtggggttacagaggggtgtgagtaaggaagggtgggttgtggatggggagggagtggaccctttggaaaggagccaaacatgttgtggctaaagggtcagaggacaggccaggcacagtggctcatgcctctaatcccaacacttgggaggccaaggcaggcagattacttgagcccaggagttcaagaccagcctgggcaacctggtgaaaccccatctctacctacaaatacaaaagttagctgggtgtagtggaggctgaggtgagaggatcacttaagcctgggaagtcgaggcttcagtgagctgtgatcactccagcctgggtgacagagagagaccctgtctaaaaaaaattaaaaaagaaaaaagaaaaaaggaaaaaaaaagttcaggagacagagctctgagcaggttcagggctctttcaggtaggacctagtctctgcctctattgaccctgctcccaatccctatctcctctctaggatagccgcttcccaaagatcctggagaacctaagactccaaaaacgtggtactggaggagtggacactgctgctacaggcggtgtctttgatatttctaatttggaccgactaggcaaatcagaggtgagatcctaagggattaggacaaggagaggtataggtctgcgagggccgaaatatggcagtgagtgagcctccgggatgtaacataatctgaaatgaaattcaggttgagtgggaggcaattggaaatgagcaggcaagtcagtcagtgataaagaaaaactcagactgtaggaagcagatcaaagattagtgtcccttaggtggagctggtgcaactggtcatcgatggagtaaactatttgattgattgtgaacggcgtctggagagaggccaggatatccgcatccccacacctgtcatccacaccaagcattaactccccatcgccagctgatgactcaagattcccaggagttttgctcattctaatgatggcccattctacttgctctggacctgcccccgcatcccctgcctccatcctagtaaagactccttgctatgctgcagctgtctgtgttacttctaatggtggggtgaggagggagcagccttcaggaaatgaaaagaggcagtgggattatttatgatggaaagagactccagatatggcaacccaggaacactgattctcaggtgggtggaaagcattaacattttacccatattcctcatcagcttctgaaaataatcaggatgcacttctgtttgcactttattcattatgacttaagatttctctccccacaatctccttctactgtagagacaggctcatagcaggtggccaaggaagctgatagtcaataccagggaccaggaaggtcgtgaccagtcctggaggccccaggctgtacttcgacctataatagacagggaatgggagtaatatcacaactcagctctccaggagcattgatacttggaaattagcgctctgcctgtagactccttcactccagggatctccctgggtgcactctaagagccagacagcaccaaattaggggtttgattctgggtcaggagatggaggatcaagctgtgcagctgggaactcaccttgctgttctgggctctcctttccctcatgttgggcccatgcaactgctcgtcgctgctcaggactcagaaaggccatttgctcaggagtgacagccacagcctgagcactggtgagactagatagttggatgggactaaacaccacctgagggcaggggtaggaatcagtgcatgcatgtagtccccattgggccctggctctcctgtggtcaccccagtccattaatacttacagcaaatttaggaggagggatgacagaaatggcaagaggagtaacgccctggatctgtccccgcagcagtgctgaaagagccaggtctgggatcccagctgttgaagcaagtggcatccaaacattgtcttagactgaccttccctctcttcaaacctatagaccttctctaactactcccaaagtgccctatcatagaccttccccaatatgtctctagccccttatttaaacaccctcaggcccccaccttaagaattgcagggcagtcttccatccagtccacccatggtatagaaaccaaaccaacttgcaccagcagtggcccagctccccacctgctatggtgccaatttcagtgaagatctcaggcccccagttactgattgggccaaacccaccaggcagtacaagtaggtgggccagaacctccagttgttcctcagagcactgcagatgcagggtgccgaggaagagagctgcttggctgtagaacagtgggaaggaaggaagaa

SEQ ID NO: 4823 - DNA, 1479 bp, Homo sapiens; identical to SEQ ID NO: 4151

SEQ ID NO: 4824 - DNA, 1924 bp, Homo sapiens; identical to SEQ ID NO: 4152

SEQ ID NO: 4825 - DNA, 2309 bp, Homo sapiens; identical to SEQ ID NO: 4153
  misc_feature (1)..(2309): n=a,t,g or c

SEQ ID NO: 4826 - DNA, 1778 bp, Homo sapiens; identical to SEQ ID NO: 439

SEQ ID NO: 4827 - DNA, 1092 bp, Homo sapiens; identical to SEQ ID NO: 4157

SEQ ID NO: 4828 - DNA, 13500 bp, Homo sapiens; identical to SEQ ID NO: 1212
  misc_feature (1)..(13500): n=a,t,g or c

SEQ ID NO: 4829 - DNA, 2029 bp, Homo sapiens
gaattcgggcccgtcggctttcttcaaccctctcttcccggagcgcccccaatccacgagtggcagccgcgggactgtcgcgtcggcgcccgacgcggagtcagcaggggcgaaaagcggtagatcatggcaaccatagaagaaattgcacatcaaattattgaacaacagatgggagagattgttacagagcagcaaactgggcagaaaatccagattgtgacagcacttgatcataatacccaaggcaagcagttcattctgacaaatcacgacggctctactccaagcaaagtcattctggccaggcaagattccactccgggaaaagttttccttacaactccagatgcagcaggtgtcaaccagttattttttaccactcctgatctgtctgcacaacacctgcagctcctaacagataattctccagaccaaggaccaaataaggtttttgatctttgcgtagtatgtggagacaaagcatcaggacgtcattatggagcagtaacttgtgaaggctgcaaaggattttttaaaagaagcatccgaaaaaatttagtatattcatgtcgaggatcaaaggattgtattattaataagcaccaccgaaaccgctgtcaatactgcaggttacagagatgtattgcgtttggaatgaagcaagactctgtccaatgtgaaagaaaacccattgaagtatcacgagaaaaatcttccaactgtgccgcttcaacagaaaaaatctatatccgaaaggaccttcgtagcccattaactgcaactccaacttttgtaacagatagtgaaagtacaaggtcaacaggactgttagattcaggaatgttcatgaatattcatccatctggagtaaaaactgagtcagctgtgctgatgacatcagataaggctgaatcatgtcagggagatttaagtacattggccaatgtggttacatcattagcgaatcttggaaaaactaaagatctttctcaaaatagtaatgaaatgtctatgattgaaagcttaagcaatgatgatacctctttgtgtgaatttcaagaaatgcagaccaacggtgatgtttcaagggcatttgacactcttgcaaaagcattgaatcctggagagagcacagcctgccagagctcagtagcgggcatggaaggaagtgtacacctaatcactggagattcaagcataaattacaccgaaaaagaggggccacttctcagcgattcacatgtagctttcaggctcaccatgccttctcctatgcctgagtacctgaatgtgcactacattggggagtctgcctccagactgctgttcttatcaatgcactgggcactttcgattccttctttccaggctctagggcaagaaaacagcatatcactggtgaaagcttactggaatgaactttttactcttggtcttgcccagtgctggcaagtgatgaatgtagcaactatattagcaacatttgtcaattgtcttcacaatagtcttcaacaagatgccaaggtaattgcagccctcattcatttcacaagacgagcaatcactgatttataaatgcttaactatagaatggcttatgactacccaaaacagtgccccatcaacaaatggggaaaattgccttttgagctcaggaataatttataaattggggactaccttttagttctttagcatattctatttcttattgttttatataatttttaaatcatttgcttcctccttatgtttaacagcagaggggtaatcaccttaaaatgtcatcaaaaatagatctactagaaggcagcatcacattcccatcttacttatggactcctacccctggttcatgtcttatatgcctgtaatggttataaagcctaccttcaggaaagctatggttgactaattactaatggatgggttttaaacatgtccctctacaataaattaaaatctttcaatgtttgaatataatgtggaggtgtttacctgagggcctctctatctccccgaattc

SEQ ID NO: 4830 - DNA, 794 bp, Homo sapiens
gcctgtaacagaggttatggtgatctgggtggatcccacagatacctcttgcaggagatatttacaagaagttccctgaatctctttccattgtgattttgcattccttagcttatatcctttatattttatgttttcatttgtaaagaaaactaacctgttttctccttttctttctcttccttctttttgcaggaggcattgaaattttcagcagagaccttccaaggacatattgcaggattctgtaatagtgaacatatggaaagtattagaaatatttattgtctgtaaatactgtaaatgcattggaataaaactgtctcccccattgctctatgaaactgcacattggtcattgtgaatatttttttttttgccaaggctaatccaattattattatcacatttaccataatttattttgtccattgatgtatttattttgtaaatgtatcttggtgctgctgaatttctatattttttgtaacataatgcactttagatatacatatcaagtatgttgataaatgacacaatgaagtgtctctattttgtggttgattttaatgaatgcctaaatataattatccaaattgattttcctttgtgcatgtaaaaataacagtattttaaatttgtaaagaatgtctaataaaatataatctaattacatcatgattcagagagtgaattctatcctttaagatttttagtagaaggaacatgatatgtttttttaaaaagcgatttgaatacaatcttaaacacagtatgtttatgttggtacattc

SEQ ID NO: 4831 - DNA, 2060 bp, Homo sapiens
tgttcccagcactcaagccttgccaccgccgagccgggcttcctgggtgtttcaggcaaggaagtctaggtccctggggggtgacccccaaggaaaaggcagcctccctgcgcacccggttgcccggagccctctccagggccggctgggctgggggttgccctggccagcaggggcccgggggcgatgccacccggtgccgactgaggccaccgcaccatggcccgctcgctgacctggcgctgctgcccctggtgcctgacggaggatgagaaggccgccgcccgggtggaccaggagatcaacaggatcctcttggagcagaagaagcaggaccgcggggagctgaagctgctgcttttgggcccaggcgagagcgggaagagcaccttcatcaagcagatgcggatcatccacggcgccggctactcggaggaggagcgcaagggcttccggcccctggtctaccagaacatcttcgtgtccatgcgggccatgatcgaggccatggagcggctgcagattccattcagcaggcccgagagcaagcaccacgctagcctggtcatgagccaggacccctataaagtgaccacgtttgagaagcgctacgctgcggccatgcagtggctgtggagggatgccggcatccgggcctgctatgagcgtcggcgggaattccacctgctcgattcagccgtgtactacctgtcccacctggagcgcatcaccgaggagggctacgtccccacagctcaggacgtgctccgcagccgcatgcccaccactggcatcaacgagtactgcttctccgtgcagaaaaccaacctgcggatcgtggacgtcgggggccagaagtcagagcgtaagaaatggatccattgtttcgagaacgtgatcgccctcatctacctggcctcactgagtgaatacgaccagtgcctggaggagaacaaccaggagaaccgcatgaaggagagcctcgcattgtttgggactatcctggaactaccctggttcaaaagcacatccgtcatcctctttctcaacaaaaccgacatcctggaggagaaaatccccacctcccacctggctacctatttccccagtttccagggccctaagcaggatgctgaggcagccaagaggttcatcctggacatgtacacgaggatgtacaccgggtgcgtggacggccccgagggcagcaagaagggcgcacgatcccgacgccttttcagccactacacatgtgccacagacacacagaacatccgcaaggtcttcaaggacgtgcgggactcggtgctcgcccgctacctggacgagatcaacctgctgtgacccaggccccacctggggcaggcggcaccggcgggcgggtgggaggtgggagtggctgcagggaccctagtgtcctggtctatctctccagcctcggcccacacgcaagggagtcgggggacggcccgctgctggccgctctcttctctgcctctcaccaggacagccgccccccagggtactcctgcccttgcttgactcagtttccctcctttgaaagggaaggagcaaaacggccatttgggatgccagggtggatgaaaaggtgaagaaatcaggggattgagacttgggtgggtgggcatctctcaggagccccatctccgggcgtgtcacctcctgggcagggttctgggaccctctgtgggtgacgcacaccctgggatggggctagtagagccttcaggcgccttcgggcgtggactctggcgcactctagtggacaggagaaggaacgccttccaggaacctgtggactaggggtgcagggacttccctttgcaaggggtaacagaccgctggaaaacactgtcactttcagagctcggtggctcacagcgtgtcctgccccggtttgcggacgagagaaatcgcggcccacaagcatcccccatcccttgcaggctgggggctgggcatgctgcatcttaaccttttgtatttattccctcaccttctgcagggctccgtgcgggctgaaattaaagatttcttag

SEQ ID NO: 4832 - DNA, 8930 bp, Homo sapiens
gaattccggaaagaaagaacatcgtttcaggaataaaaatgcacagtagtagttatagttaccgtagcagtgattctgtgtttagtaacactaccagcactcgaaccagtcttgattcaaatgaaaatcttctcttggttcattgtggtccaacactgatcaactcttgcattagcttcggcagtgaatcctttgatggacacaggttagaaatgttgcaacagattgccaacagagttcagagggacagtgtcatctgtgaagacaaactgattcttgctggaaatgctcttcagtctgattctaaaagattagaatcaggagtgcagtttcagaatgaagcagaaattgctgggtatatacttgaatgtgagaaccttttacgccagcatgtaattgatgtacagattcttattgatggaaaatactaccaggcagatcaattggtacagagggttgcaaaactgcgtgacgaaattatggccttaaggaacgaatgttcttctgtgtacagcaaaggacgcatactgacaacagaacagacaaagctcatgatatcaggaatcactcaaagtttaaactcaggatttgcacagaccttacaccctagtctgacctcagggctgacccagagtttaacaccttccctaacctcttctagtatgacttctggcctgtcatcagggatgacttcccgcctgactccatctgtcactccagcttatacacctggtttcccatcaggattagttccaaatttcagttcaggagtagagccaaattcattgcaaactttgaagttgatgcagatccgaaaaccccttctaaagtcttctttgctggatcaaaatttaacagaagaagaaatcaatatgaaatttgttcaggatcttttgaattgggttgatgagatgcaggtacaactggaccgcactgagtggggctcagatttgccaagtgttgaaagccatttagaaaatcataaaaatgttcatagagctattgaagaatttgaatctagtctcaaagaagctaaaatcagtgagattcaaatgacagcacctcttaaactgacttatgcagaaaagttgcacagattagagagtcagtatgcaaaactcttgaatacatccaggaatcaagaacggcaccttgatacactccataattttgtaagtcgtgcgactaatgaacttatttggttgaatgaaaaagaagaggaggaagttgcttatgactggagtgagagaaacaccaacatagctaggaaaaaagattatcatgctgaattaatgagagaacttgatcaaaaggaagaaaatattaaatcagttcaggagatagcagagcagctacttctagaaaatcatccagcccggttaactattgaggcctacagagcggcaatgcagacgcagtggagctggatcttacagctctgccagtgtgtggagcagcacataaaggagaacacagcgtatttcgagtttttcaatgatgccaaagaagctactgattacttaaggaatctaaaagatgccattcagcggaagtacagctgtgatagatcaagcagcattcacaagctagaagaccttgttcaggaatcaatggaagagaaagaagaacttctgcagtacaaaagcactatagcaaacctaatgggaaaagcaaaaacaataattcaactgaagccaaggaattctgactgtccactcaaaacttctattccgatcaaagctatctgtgactacagacaaattgagataaccatttacaaagacgatgaatgtgttttggcaaataactctcatcgtgctaaatggaaggtcattagtcctactgggaatgaggctatggtcccatctgtgtgcttcaccgttcctccaccaaacaaagaagcggtggaccttgccaacagaattgagcaacagtatcagaatgtcctgactctttggcatgagtctcacataaacatgaagagtgtagtatcctggcattatctcatcaatgaaattgatagaattcgagctagcaatgtggcttcaataaagacaatgctacctggtgaacatcagcaagttctaagtaatctacaatctcgttttgaagattttctggaagatagccaggaatcccaagtcttttcaggctcagatataacacaactggaaaaggaggttaatgtatgtaagcagtattatcaagaacttcttaaatctgcagaaagagaggagcaagaggaatcagtttataatctctacatctctgaagttcgaaacattagacttcggttagagaactgtgaagatcggctgattagacagattcgaactcccctggaaagagatgatttgcatgaaagtgtgttcagaatcacagaacaggagaaactaaagaaagagctggaacgacttaaagatgatttgggaacaatcacaaataagtgtgaggagtttttcagtcaagcagcagcctcttcatcagtccctaccctacgatcagagcttaatgtggtccttcagaacatgaaccaagtctattctatgtcttccacttacatagataagttgaaaactgttaacttggggttaaaaaacactcaagctgcagaagccctcgtaaaactctatgaaactaaactgtgtgaagaagaagcagttatagctgacaagaataatattgagaatctaataagtactttaaagcaatggagatctgaagtagatgaaaagagacaggtattccatgccttagaggatgagttgcagaaagctaaagccatcagtgatgaaatgtttaaaacgtataaagaacgggaccttgattttgactggcacaaagaaaaagcagatcaattagttgaaaggtggcaaaatgttcatgtgcagattgacaacaggttacgggacttagagggcattggcaaatcactgaagtactacagagacacttaccatcctttagatgattggatccagcaggttgaaactactcagagaaagattcaggaaaatcagcctgaaaatagtaaaaccctagccacacagttgaatcaacagaagatgctggtgtccgaaatagaaatgaaacagagcaaaatggacgagtgtcaaaaatatgcagaacagtactcagctacagtgaaggactatgaattacaaacaatgacctaccgggccatggtagattcacaacaaaaatctccagtgaaacgccgaagaatgcagagttcagcagatctcattattcaagagttcatggacctaaggactcgatatactgccctggtcactctcatgacacaatatattaaatttgctggtgattcattgaagaggctggaagaggaggagattaaaaggtgtaaggagacttctgaacatggggcatattcagatctgcttcagcgtcagaaggcaacagtgcttgagaatagcaaacttacaggaaagataagtgagttggaaagaatggtagctgaactaaagaaacaaaagtcccgagtagaggaagaacttccgaaggtcagggaggctgcagaaaatgaattgagaaagcagcagagaaatgtagaagatatctctctgcagaagataagggctgaaagtgaagccaagcagtaccgcagggaacttgaaaccattgtgagagagaaggaagccgctgaaagagaactggagcgggtgaggcagctcaccatagaggccgaggctaaaagagctgccgtggaagagaacctcctgaattttcgcaatcagttggaggaaaacacctttaccagacgaacactggaagatcatcttaaaagaaaagatttaagtctcaatgatttggagcaacaaaaaaataaattaatggaagaattaagaagaaagagagacaatgaggaagaactcttgaagctgataaagcagatggaaaaagaccttgcatttcagaaacaggtagcagagaaacagttgaaagaaaagcagaaaattgaattggaagcaagaagaaaaataactgaaattcagtatacatgtagagaaaatgcattgccagtgtgtccgatcacacaggctacatcatgcagggcagtaacgggtctccagcaagaacatgacaagcagaaagcagaagaactcaaacagcaggtagatgaactaacagctgccaatagaaaggctgaacaagacatgagagagctgacatatgaacttaatgccctccagcttgaaaaaacgtcatctgaggaaaaggctcgtttgctaaaagataaactagatgaaacaaataatacactcagatgccttaagttggagctggaaaggaaggatcaggcggagaaagggtattctcaacaactcagagagcttggtaggcaattgaatcaaaccacaggtaaagctgaagaagccatgcaagaagctagtgatctcaagaaaataaagcgcaattatcagttagaattagaatctcttaatcatgaaaaagggaaactacaaagagaagtagacagaatcacaagggcacatgctgtagctgagaagaatattcagcatttaaattcacaaattcattcttttcgagatgagaaagaattagaaagactacaaatctgccagagaaaatcagatcatctaaaagaacaatttgagaaaagccatgagcagttgcttcaaaatatcaaagctgaaaaagaaaataatgataaaatccaaaggctcaatgaagaattggagaaaagtaatgagtgtgcagagatgctaaaacaaaaagtagaggagcttactaggcagaataatgaaaccaaattaatgatgcagagaattcaggcagaatcagagaatatagttttagagaaacaaactatccagcaaagatgtgaagcactgaaaattcaggcagatggttttaaagatcagctacgcagcacaaatgaacacttgcataaacagacaaaaacagagcaggattttcaaacaaaaattaaatgcctagaagaagacctggcgaaaagtcaaaatttggtaagtgaatttaagcaaaagtgtgaccaacagaacattatcatccagaataccaagaaagaagttagaaatctgaatgcggaactgaatgcttccaaagaagagaagcgacgcggggagcagaaagttcagctacaacaagctcaggtgcaagagttaaataacaggttgaaaaaagtacaagacgaattacacttaaagaccatagaggagcagatgacccacagaaagatggttctgtttcaggaagaatctggtaaattcaaacaatcagcagaggagtttcggaagaagatggaaaaattaatggagtccaaagtcatcactgaaaatgatatttcaggcattaggcttgactttgtgtctcttcaacaagaaaactctagagcccaagaaaatgctaagctttgtgaaacaaacattaaagaacttgaaagacagcttcaacagtatcgtgaacaaatgcagcaagggcagcacatggaagcaaatcattaccaaaaatgtcagaaacttgaggatgagctgatagcccagaagcgtgaggttgaaaacctgaagcaaaaaatggaccaacagatcaaagagcatgaacatcaattagttttgctccagtgtgaaattcaaaaaaagagcacagccaaagactgtaccttcaaaccagattttgagatgacagtgaaggagtgccagcactctggagagctgtcctctagaaacactggacaccttcacccaacacccagatcccctctgttgagatggactcaagaaccacagccattggaagagaagtggcagcatcgggttgttgaacagatacccaaagaagtccaattccagccaccaggggctccactcgagaaagagaaaagccagcagtgttactctgagtacttttctcagacaagcaccgagttacagataacttttgatgagacaaaccccattacaagactgtctgaaattgagaagataagagaccaagccctgaacaattctagaccacctgttaggtatcaagataacgcatgtgaaatggaactggtgaaggttttgacacccttagagatagctaagaacaagcagtatgatatgcatacagaagtcacaacattaaaacaagaaaagaacccagttcccagtgctgaagaatggatgcttgaagggtgcagagcatctggtggactcaagaaaggggatttccttaagaagggcttagaaccagagaccttccagaactttgatggtgatcatgcatgttcagtcagggatgatgaatttaaattccaagggcttaggcacactgtgactgccaggcagttggtggaagctaagcttctggacatgagaacaattgagcagctgcgactcggtcttaagactgttgaagaagttcagaaaactcttaacaagtttctgacgaaagccacctcaattgcagggctttacctagaatctacaaaagaaaagatttcatttgcctcagcggccgagagaatcataatagacaaaatggtggctttggcatttttagaagctcaggctgcaacaggttttataattgatcccatttcaggtcagacatattctgttgaagatgcagttcttaaaggagttgttgaccccgaattcagaattaggcttcttgaggcagagaaggcagctgtgggatattcttattcttctaagacattgtcagtgtttcaagctatggaaaatagaatgcttgacagacaaaaaggtaaacatatcttggaagcccagattgccagtgggggtgtcattgaccctgtgagaggcattcgtgttcctccagaaattgctctgcagcaggggttgttgaataatgccatcttacagtttttacatgagccatccagcaacacaagagttttccctaatcccaataacaagcaagctctgtattactcagaattactgcgaatgtgtgtatttgatgtagagtcccaatgctttctgtttccatttggggagaggaacatttccaatctcaatgtcaagaaaacacatagaatttctgtagtagatactaaaacaggatcagaattgaccgtgtatgaggctttccagagaaacctgattgagaaaactatatatcttgaactttcagggcagcaatatcagtggaaggaagctatgttttttgaatcctatgggcattcttctcatatgctgactgatactaaaacaggattacacttcaatattaatgaggctatagagcagggaacaattgacaaagccttggtcaaaaagtatcaggaaggcctcatcacacttacagaacttgctgattctttgctgagccggttagtccccaagaaagatttgcacagtcctgttgcagggtattggctgactgctagtggggaaaggatctctgtactaaaagcctcccgtagaaatttggttgatcggattactgccctccgatgccttgaagcccaagtcagtacagggggcataattgatcctcttactgtcaaaaagtaccgggtggccgaagctttgcatagaggcctggttgatgaggggtttgcccagcagctgcgacagtgtgaattagtaatcacagggattggccatcccatcactaacaaaatgatgtcagtggtggaagctgtgaaggcaaatattataaataaggaaatgggaatccgatgtttggaatttcagtacttgacaggagggttgatagagccacaggttcactctcggttatcaatagaagaggctctccaagtaggtattatagatgtcctcattgccacaaaactcaaagatcaaaagtcatatgtcagaaatataatatgccctcagacaaaaagaaagttgacatataaagaagccttagaaaaacctgattttgatttccacacaggacttaaactgttagaagtatctgagcccctgatgacaggaatttctagcctctactattcttcctaatgggacatgtttaaataactgtgcaaggggtgatgcaggctggttcatgccactttttcagagtatgatgatatcggctacatatgcagtctgtgaattatgtaacatactctatttcttgagggctgcaaattgctaagtgctcaaaatagagtaagttttaaattgaaaattacataagatttaatgcccttcaaatggtttcatttagccttgagaatggttttttgaaacttggccacactaaaatgtttttttttttacgtagaatgtgggataaacttgatgaactccaagttcacagtgtcatttcttcagaactccccttcattgaatagtgatcatttattaaatgataaattgcactcgctgaaagagcacgtcatgaagcaccatggaatcaaagagaaagatataaattcgttcccacagccttcaagctgcagtgttttagattgcttcaaaaaatgaaaaagttttgcctttttctgtatatagtgaccttctttgcatattaaaatgtttaccacaatgtcccatttctagttaagtcttcgcacttgaaagctaacattatgaatattatgtgttggaggaggggaaggattttcttcattctgtgtattttccttacatgtacagtagacgttctctattctatcagccttctatggtacctttttgtcaggacaattaggattgtaatgctaatgcaaaggcagcaattcaaagatcttctagtgcctcatgaataaagttgagatttaaaatttgtaacattgatggaacagctgggaggttagaccaatcattaaggaatgtatgccatacctttctttgctaccataaacattttggaggtgcatctgctatgtgacatggtaaatatggttaagtgaatgaataaaatgttttagtaacctgtgtcggattccgcggaat

SEQ ID NO: 4833 - DNA, 1764 bp, Homo sapiens; identical to SEQ ID NO: 3725

SEQ ID NO: 4834 - DNA, 3336 bp, Homo sapiens
ttttcttagacattaactgcagacggctggcaggatagaagcagcggctcacttggactttttcaccagggaaatcagagacaatgatggggctcttccccagaactacaggggctctggccatcttcgtggtggtcatattggttcatggagaattgcgaatagagactaaaggtcaatatgatgaagaagagatgactatgcaacaagctaaaagaaggcaaaaacgtgaatgggtgaaatttgccaaaccctgcagagaaggagaagataactcaaaaagaaacccaattgccaagattacttcagattaccaagcaacccagaaaatcacctaccgaatctctggagtgggaatcgatcagccgccttttggaatctttgttgttgacaaaaacactggagatattaacataacagctatagtcgaccgggaggaaactccaagcttcctgatcacatgtcgggctctaaatgcccaaggactagatgtagagaaaccacttatactaacggttaaaattttggatattaatgataatcctccagtattttcacaacaaattttcatgggtgaaattgaagaaaatagtgcctcaaactcactggtgatgatactaaatgccacagatgcagatgaaccaaaccacttgaattctaaaattgccttcaaaattgtctctcaggaaccagcaggcacacccatgttcctcctaagcagaaacactggggaagtccgtactttgaccaattctcttgaccgagagcaagctagcagctatcgtctggttgtgagtggtgcagacaaagatggagaaggactatcaactcaatgtgaatgtaatattaaagtgaaagatgtcaacgataacttcccaatgtttagagactctcagtattcagcacgtattgaagaaaatattttaagttctgaattacttcgatttcaagtaacagatttggatgaagagtacacagataattggcttgcagtatatttctttacctctgggaatgaaggaaattggtttgaaatacaaactgatcctagaactaatgaaggcatcctgaaagtggtgaaggctctagattatgaacaactacaaagcgtgaaacttagtattgctgtcaaaaacaaagctgaatttcaccaatcagttatctctcgataccgagttcagtcaaccccagtcacaattcaggtaataaatgtaagagaaggaattgcattccgtcctgcttccaagacatttactgtgcaaaaaggcataagtagcaaaaaattggtggattatatcctgggaacatatcaagccatcgatgaggacactaacaaagctgcctcaaatgtcaaatatgtcatgggacgtaacgatggtggatacctaatgattgattcaaaaactgctgaaatcaaatttgtcaaaaatatgaaccgagattctactttcatagttaacaaaacaatcacagctgaggttctggccatagatgaatacacgggtaaaacttctacaggcacggtatatgttagagtacccgatttcaatgacaattgtccaacagctgtcctcgaaaaagatgcagtttgcagttcttcaccttccgtggttgtctccgctagaacactgaataatagatacactggcccctatacatttgcactggaagatcaacctgtaaagttgcctgccgtatggagtatcacaaccctcaatgctacctcggccctcctcagagcccaggaacagatacctcctggagtataccacatctccctggtacttacagacagtcagaacaatcggtgtgagatgccacgcagcttgacactggaagtctgtcagtgtgacaacaggggcatctgtggaacttcttacccaaccacaagccctgggaccaggtatggcaggccgcactcagggaggctggggcctgccgccatcggcctgctgctccttggtctcctgctgctgctgttggccccccttctgctgttgacctgtgactgtggggcaggttctactgggggagtgacaggtggttttatcccagttcctgatggctcagaaggaacaattcatcagtggggaattgaaggagcccatcctgaagacaaggaaatcacaaatatttgtgtgcctcctgtaacagccaatggagccgatttcatggaaagttctgaagtttgtacaaatacgtatgccagaggcacagcggtggaaggcacttcaggaatggaaatgaccactaagcttggagcagccactgaatctggaggtgctgcaggctttgcaacagggacagtgtcaggagctgcttcaggattcggagcagccactggagttggcatctgttcctcagggcagtctggaaccatgagaacaaggcattccactggaggaaccaataaggactacgctgatggggcgataagcatgaattttctggactcctacttttctcagaaagcatttgcctgtgcggaggaagacgatggccaggaagcaaatgactgcttgttgatctatgataatgaaggcgcagatgccactggttctcctgtgggctccgtgggttgttgcagttttattgctgatgacctggatgacagcttcttggactcacttggacccaaatttaaaaaacttgcagagataagccttggtgttgatggtgaaggcaaagaagttcagccaccctctaaagacagcggttatgggattgaatcctgtggccatcccatagaagtccagcagacaggatttgttaagtgccagactttgtcaggaagtcaaggagcttctgctttgtccgcctctgggtctgtccagccagctgtttccatccctgaccctctgcagcatggtaactatttagtaacggagacttactcggcttctggttccctcgtgcaaccttccactgcaggctttgatccacttctcacacaaaatgtgatagtgacagaaagggtgatctgtcccatttccagtgttcctggcaacctagctggcccaacgcagctacgagggtcacatactatgctctgtacagaggatccttgctcccgtctaatatgaccagaatgagctggaataccacactgaccaaatctggatctttggactaaagtattcaaaatagcatagcaaagctcactgtattgggctaataatttggcacttattagcttctctcataaactgatcacgattataaattaaatgtttgggttcataccccaaaagcaatatgttgtcactcctaattctcaagtactattcaaattgtagtaaatcttaaagtttttcaaaaccctaaaatcatattcgc

SEQ ID NO: 4835 - DNA, 865 bp, Homo sapiens; identical to SEQ ID NO: 4167

SEQ ID NO: 4836 - DNA, 2311 bp, Homo sapiens; identical to SEQ ID NO: 3726

SEQ ID NO: 4837 - DNA, 1709 bp, Homo sapiens
caatttgagtttccatttctcggatttgggaactggtataagcattgtctgtgatgtaaacaaagtcttcaatatttggagaaaacatctcctcatacttgagagcacaagaggaagagagagaccctcactgctggggagtccctgccacactcagtcccccaccacactgaatcggaattccgagagggaagaggaggcgcgagaatggaggtggaggccgtctgtggtggcgcgggcgaggtggaggcccaggactctgaccctgcccctgccttcagcaaggcccccggcagcgccggccactacgaactgccgtgggttgaaaaatataggccagtaaagctgaatgaaattgtcgggaatgaagacaccgtgagcaggctagaggtctttgcaagggaaggaaatgtgcccaacatcatcattgcgggccctccaggaaccggcaagaccacaagcattctgtgcttggcccgggccctgctgggcccagcactcaaagatgccatgttggaactcaatgcttcaaatgacaggggcattgacgttgtgaggaataaaattaaaatgtttgctcaacaaaaagtcactcttcccaaaggccgacataagatcatcattctggatgaagcagacagcatgaccgacggagcccagcaagccttgaggagaaccatggaaatctactctaaaaccactcgcttcgcccttgcttgtaatgcttcggataagatcatcgagcccattcagtcccgctgtgcagtcctccggtacacaaagctgaccgacgcccagatcctcaccaggctgatgaatgttatcgagaaggagagggtaccctacactgatgacggcctagaagccatcatcttcacggcccagggagacatgaggcaggcgctgaacaacctgcagtccaccttctcaggatttggcttcattaacagtgagaacgtgttcaaggtctgtgacgagccccacccactgctggtaaaggagatgatccagcactgtgtgaatgccaacattgacgaagcctacaagattcttgctcacttgtggcatctgggctactcaccagaagatatcattggcaacatctttcgagtgtgtaaaactttccaaatggcagaatacctgaaactggagtttatcaaggaaattggatacactcacatgaaaatagcggaaggagtgaactctcttttgcagatggcaggcctcctggcaaggctgtgtcagaagacaatggccccggtggccagttagagcagagacttcactgactgacttacaggtgccctattctgaggtacaggagccgcggctttctgatgggggaaaatgcgccttaggctgagccaacatgactgtcccccaaactccagtggctggccaggcgcggtagtcacgcctgtaatcccaacactttgggaggccgaggcaggtggatcacctgaggtcagaagttcaagaccagcctggccaacatggggaaaccctgtctttactaaaaatataaaaattagctgggtgtggtggcgggcacctgtaatcccagctactcgggaggctgtggcaggcgaaatcgcttgaacccaggaggaggaggtggaggttgcagtgagccaagatcacaccattgcactccagcctgggcgacagagactccatctggggaaaaaaattaaataaataaactcccg

SEQ ID NO: 4838 - DNA, 890 bp, Homo sapiens; identical to SEQ ID NO: 4169

SEQ ID NO: 4839 - DNA, 7941 bp, Homo sapiens
cacacatacgcacgcacgatctcacttcgatctatacactggaggattaaaacaaacaaacaaaaaaaacatttccttcgctccccctccctctccactctgagaagcagaggagccgcacggcgaggggccgcagaccgtctggaaatgcgaatcctaaagcgtttcctcgcttgcattcagctcctctgtgtttgccgcctggattgggctaatggatactacagacaacagagaaaacttgttgaagagattggctggtcctatacaggagcactgaatcaaaaaaattggggaaagaaatatccaacatgtaatagcccaaaacaatctcctatcaatattgatgaagatcttacacaagtaaatgtgaatcttaagaaacttaaatttcagggttgggataaaacatcattggaaaacacattcattcataacactgggaaaacagtggaaattaatctcactaatgactaccgtgtcagcggaggagtttcagaaatggtgtttaaagcaagcaagataacttttcactggggaaaatgcaatatgtcatctgatggatcagagcatagtttagaaggacaaaaatttccacttgagatgcaaatctactgctttgatgcggaccgattttcaagttttgaggaagcagtcaaaggaaaagggaagttaagagctttatccattttgtttgaggttgggacagaagaaaatttggatttcaaagcgattattgatggagtcgaaagtgttagtcgttttgggaagcaggctgctttagatccattcatactgttgaaccttctgccaaactcaactgacaagtattacatttacaatggctcattgacatctcctccctgcacagacacagttgactggattgtttttaaagatacagttagcatctctgaaagccagttggctgttttttgtgaagttcttacaatgcaacaatctggttatgtcatgctgatggactacttacaaaacaattttcgagagcaacagtacaagttctctagacaggtgttttcctcatacactggaaaggaagagattcatgaagcagtttgtagttcagaaccagaaaatgttcaggctgacccagagaattataccagccttcttgttacatgggaaagacctcgagtcgtttatgataccatgattgagaagtttgcagttttgtaccagcagttggatggagaggaccaaaccaagcatgaatttttgacagatggctatcaagacttgggtgctattctcaataatttgctacccaatatgagttatgttcttcagatagtagccatatgcactaatggcttatatggaaaatacagcgaccaactgattgtcgacatgcctactgataatcctgaacttgatcttttccctgaattaattggaactgaagaaataatcaaggaggaggaagagggaaaagacattgaagaaggcgctattgtgaatcctggtagagacagtgctacaaaccaaatcaggaaaaaggaaccccagatttctaccacaacacactacaatcgcatagggacgaaatacaatgaagccaagactaaccgatccccaacaagaggaagtgaattctctggaaagggtgatgttcccaatacatctttaaattccacttcccaaccagtcactaaattagccacagaaaaagatatttccttgacttctcagactgtgactgaactgccacctcacactgtggaaggtacttcagcctctttaaatgatggctctaaaactgttcttagatctccacatatgaacttgtcggggactgcagaatccttaaatacagtttctataacagaatatgaggaggagagtttattgaccagtttcaagcttgatactggagctgaagattcttcaggctccagtcccgcaacttctgctatcccattcatctctgagaacatatcccaagggtatatattttcctccgaaaacccagagacaataacatatgatgtccttataccagaatctgctagaaatgcttccgaagattcaacttcatcaggttcagaagaatcactaaaggatccttctatggagggaaatgtgtggtttcctagctctacagacataacagcacagcccgatgttggatcaggcagagagagctttctccagactaattacactgagatacgtgttgatgaatctgagaagacaaccaagtccttttctgcaggcccagtgatgtcacagggtccctcagttacagatctggaaatgccacattattctacctttgcctacttcccaactgaggtaacacctcatgcttttaccccatcctccagacaacaggatttggtctccacggtcaacgtggtatactcgcagacaacccaaccggtatacaatggtgagacacctcttcaaccttcctacagtagtgaagtctttcctctagtcacccctttgttgcttgacaatcagatcctcaacactacccctgctgcttcaagtagtgattcggccttgcatgctacgcctgtatttcccagtgtcgatgtgtcatttgaatccatcctgtcttcctatgatggtgcacctttgcttccattttcctctgcttccttcagtagtgaattgtttcgccatctgcatacagtttctcaaatccttccacaagttacttcagctaccgagagtgataaggtgcccttgcatgcttctctgccagtggctgggggtgatttgctattagagcccagccttgctcagtattctgatgtgctgtccactactcatgctgcttcagagacgctggaatttggtagtgaatctggtgttctttataaaacgcttatgttttctcaagttgaaccacccagcagtgatgccatgatgcatgcacgttcttcagggcctgaaccttcttatgccttgtctgataatgagggctcccaacacatcttcactgtttcttacagttctgcaatacctgtgcatgattctgtgggtgtaacttatcagggttccttatttagcggccctagccatataccaatacctaagtcttcgttaataaccccaactgcatcattactgcagcctactcatgccctctctggtgatggggaatggtctggagcctcttctgatagtgaatttcttttacctgacacagatgggctgacagcccttaacatttcttcacctgtttctgtagctgaatttacatatacaacatctgtgtttggtgatgataataaggcgctttctaaaagtgaaataatatatggaaatgagactgaactgcaaattccttctttcaatgagatggtttacccttctgaaagcacagtcatgcccaacatgtatgataatgtaaataagttgaatgcgtctttacaagaaacctctgtttccatttctagcaccaagggcatgtttccagggtcccttgctcataccaccactaaggtttttgatcatgagattagtcaagttccagaaaataacttttcagttcaacctacacatactgtctctcaagcatctggtgacacttcgcttaaacctgtgcttagtgcaaactcagagccagcatcctctgaccctgcttctagtgaaatgttatctccttcaactcagctcttattttatgagacctcagcttcttttagtactgaagtattgctacaaccttcctttcaggcttctgatgttgacaccttgcttaaaactgttcttccagctgtgcccagtgatccaatattggttgaaacccccaaagttgataaaattagttctacaatgttgcatctcattgtatcaaattctgcttcaagtgaaaacatgctgcactctacatctgtaccagtttttgatgtgtcgcctacttctcatatgcactctgcttcacttcaaggtttgaccatttcctatgcaagtgagaaatatgaaccagttttgttaaaaagtgaaagttcccaccaagtggtaccttctttgtacagtaatgatgagttgttccaaacggccaatttggagattaaccaggcccatcccccaaaaggaaggcatgtatttgctacacctgttttatcaattgatgaaccattaaatacactaataaataagcttatacattccgatgaaattttaacctccaccaaaagttctgttactggtaaggtatttgctggtattccaacagttgcttctgatacatttgtatctactgatcattctgttcctataggaaatgggcatgttgccattacagctgtttctccccacagagatggttctgtaacctcaacaaagttgctgtttccttctaaggcaacttctgagctgagtcatagtgccaaatctgatgccggtttagtgggtggtggtgaagatggtgacactgatgatgatggtgatgatgatgatgacagagatagtgatggcttatccattcataagtgtatgtcatgctcatcctatagagaatcacaggaaaaggtaatgaatgattcagacacccacgaaaacagtcttatggatcagaataatccaatctcatactcactatctgagaattctgaagaagataatagagtcacaagtgtatcctcagacagtcaaactggtatggacagaagtcctggtaaatcaccatcagcaaatgggctatcccaaaagcacaatgatggaaaagaggaaaatgacattcagactggtagtgctctgcttcctctcagccctgaatctaaagcatgggcagttctgacaagtgatgaagaaagtggatcagggcaaggtacctcagatagccttaatgagaatgagacttccacagatttcagttttgcagacactaatgaaaaagatgctgatgggatcctggcagcaggtgactcagaaataactcctggattcccacagtccccaacatcatctgttactagcgagaactcagaagtgttccacgtttcagaggcagaggccagtaatagtagccatgagtctcgtattggtctagctgaggggttggaatccgagaagaaggcagttataccccttgtgatcgtgtcagccctgacttttatctgtctagtggttcttgtgggtattctcatctactggaggaaatgcttccagactgcacacttttacttagaggacagtacatcccctagagttatatccacacctccaacacctatctttccaatttcagatgatgtcggagcaattccaataaagcactttccaaagcatgttgcagatttacatgcaagtagtgggtttactgaagaatttgagacactgaaagagttttaccaggaagtgcagagctgtactgttgacttaggtattacagcagacagctccaaccacccagacaacaagcacaagaatcgatacataaatatcgttgcctatgatcatagcagggttaagctagcacagcttgctgaaaaggatggcaaactgactgattatatcaatgccaattatgttgatggctacaacagaccaaaagcttatattgctgcccaaggcccactgaaatccacagctgaagatttctggagaatgatatgggaacataatgtggaagttattgtcatgataacaaacctcgtggagaaaggaaggagaaaatgtgatcagtactggcctgccgatgggagtgaggagtacgggaactttctggtcactcagaagagtgtgcaagtgcttgcctattatactgtgaggaattttactctaagaaacacaaaaataaaaaagggctcccagaaaggaagacccagtggacgtgtggtcacacagtatcactacacgcagtggcctgacatgggagtaccagagtactccctgccagtgctgacctttgtgagaaaggcagcctatgccaagcgccatgcagtggggcctgttgtcgtccactgcagtgctggagttggaagaacaggcacatatattgtgctagacagtatgttgcagcagattcaacacgaaggaactgtcaacatatttggcttcttaaaacacatccgttcacaaagaaattatttggtacaaactgaggagcaatatgtcttcattcatgatacactggttgaggccatacttagtaaagaaactgaggtgctggacagtcatattcatgcctatgttaatgcactcctcattcctggaccagcaggcaaaacaaagctagagaaacaattccagctcctgagccagtcaaatatacagcagagtgactattctgcagccctaaagcaatgcaacagggaaaagaatcgaacttcttctatcatccctgtggaaagatcaagggttggcatttcatccctgagtggagaaggcacagactacatcaatgcctcctatatcatgggctattaccagagcaatgaattcatcattacccagcaccctctccttcataccatcaaggatttctggaggatgatatgggaccataatgcccaactggtggttatgattcctgatggccaaaacatggcagaagatgaatttgtttactggccaaataaagatgagcctataaattgtgagagctttaaggtcactcttatggctgaagaacacaaatgtctatctaatgaggaaaaacttataattcaggactttatcttagaagctacacaggatgattatgtacttgaagtgaggcactttcagtgtcctaaatggccaaatccagatagccccattagtaaaacttttgaacttataagtgttataaaagaagaagctgccaatagggatgggcctatgattgttcatgatgagcatggaggagtgacggcaggaactttctgtgctctgacaacccttatgcaccaactagaaaaagaaaattccgtggatgtttaccaggtagccaagatgatcaatctgatgaggccaggagtctttgctgacattgagcagtatcagtttctctacaaagtgatcctcagccttgtgagcacaaggcaggaagagaatccatccacctctctggacagtaatggtgcagcattgcctgatggaaatatagctgagagcttagagtctttagtttaacacagaaaggggtggggggactcacatctgagcattgttttcctcttcctaaaattaggcaggaaaatcagtctagttctgttatctgttgatttcccatcacctgacagtaactttcatgacataggattctgccgccaaatttatatcattaacaatgtgtgcctttttgcaagacttgtaatttacttattatgtttgaactaaaatgattgaattttacagtatttctaagaatggaattgtggtatttttttctgtattgattttaacagaaaatttcaatttatagaggttaggaattccaaactacagaaaatgtttgtttttagtgtcaaatttttagctgtatttgtagcaattatcaggtttgctagaaatataacttttaatacagtagcctgtaaataaaacactcttccatatgatattcaacattttacaactgcagtattcacctaaagtagaaataatctgttacttattgtaaatactgccctagtgtctccatggaccaaatttatatttataattgtagatttttatattttactactgagtcaagttttctagttctgtgtaattgtttagtttaatgacgtagttcattagctggtcttactctaccagttttctgacattgtattgtgttacctaagtcattaactttgtttcagcatgtaattttaacttttgtggaaaatagaaataccttcattttgaaagaagtttttatgagaataacaccttaccaaacattgttcaaatggtttttatccaaggaattgcaaaaataaatataaatattgccattaaaaaaaaaaaaaaaaaaaaaaaaaaaaaaaaaaa

SEQ ID NO: 4840 - DNA, 2566 bp, Homo sapiens
ggcacgagttgtgctcctcgcttgcctgttccttttccacgcattttccaggataactgtgactccaggcccgcaatggatgccctgcaactagcaaattcggcttttgccgttgatctgttcaaacaactatgtgaaaaggagccactgggcaatgtcctcttctctccaatctgtctctccacctctctgtcacttgctcaagtgggtgctaaaggtgacactgcaaatgaaattggacaggttcttcattttgaaaatgtcaaagatataccctttggatttcaaacagtaacatcggatgtaaacaaacttagttccttttactcactgaaactaatcaagcggctctacgtagacaaatctctgaatctttctacagagttcatcagctctacgaagagaccctatgcaaaggaattggaaactgttgacttcaaagataaattggaagaaacgaaaggtcagatcaacaactcaattaaggatctcacagatggccactttgagaacattttagctgacaacagtgtgaacgaccagaccaaaatccttgtggttaatgctgcctactttgttggcaagtggatgaagaaatttcctgaatcagaaacaaaagaatgtcctttcagactcaacaagacagacaccaaaccagtgcagatgatgaacatggaggccacgttctgtatgggaaacattgacagtatcaattgtaagatcatagagcttccttttcaaaataagcatctcagcatgttcatcctactacccaaggatgtggaggatgagtccacaggcttggagaagattgaaaaacaactcaactcagagtcactgtcacagtggactaatcccagcaccatggccaatgccaaggtcaaactctccattccaaaatttaaggtggaaaagatgattgatcccaaggcttgtctggaaaatctagggctgaaacatatcttcagtgaagacacatctgatttctctggaatgtcagagaccaagggagtggccctatcaaatgttatccacaaagtgtgcttagaaataactgaagatggtggggattccatagaggtgccaggagcacggatcctgcagcacaaggatgaattgaatgctgaccatccctttatttacatcatcaggcacaacaaaactcgaaacatcattttctttggcaaattctgttctccttaagtggcatagcccatgttaagtcctccctgacttttctgtggatgccgatttctgtaaactctgcatccagagattcattttctagatacaataaattgctaatgttgctggatcaggaagccgccagtacttgtcatatgtagccttcacacagatagacctttttttttttccaattctatcttttgtttccttttttcccataagacaatgacatacgcttttaatgaaaaggaatcacgttagaggaaaaatatttattcattatttgtcaaattgtccggggtagttggcagaaatacagtcttccacaaagaaaattcctataaggaagatttggaagctcttcttcccagcactatgctttccttctttgggatagagaatgttccagacattctcgcttccctgaaagactgaagaaagtgtagtgcatgggacccacgaaactgccctggctccagtgaaacttgggcacatgctcaggctactataggtccagaagtccttatgttaagccctggcaggcaggtgtttattaaaattctgaattttggggattttcaaaagataatattttacatacactgtatgttatagaacttcatggatcagatctggggcagcaacctataaatcaacaccttaatatgctgcaacaaaatgtagaatattcagacaaaatggatacataaagactaagtagcccataaggggtcaaaatttgctgccaaatgcgtatgccaccaacttacaaaaacacttcgttcgcagagcttttcagattgtggaatgttggataaggaattatagacctctagtagctgaaatgcaagaccccaagaggaagttcagatcttaatataaattcactttcatttttgatagctgtcccatctggtcatgtggttggcactagactggtggcaggggcttctagctgactcgcacagggattctcacaatagccgatatcagaatttgtgttgaaggaacttgtctcttcatctaatatgatagcgggaaaaggagaggaaactactgcctttagaaaatataagtaaagtgattaaagtgctcacgttaccttgacacatagtttttcagtctatgggtttagttactttagatggcaagcatgtaacttatattaatagtaatttgtaaagttgggtggataagctatccctgttgccggttcatggattacttctctataaaaaatatatatttaccaaaaaattttgtgacattccttctcccatctcttccttgacatgcattgtaaataggttcttcttgttctgagattcaatattgaatttctcctatgctattgacaataaaatattattgaactacc

SEQ ID NO: 4841 - DNA, 1388 bp, Homo sapiens; identical to SEQ ID NO: 4176

SEQ ID NO: 4842 - DNA, 1005 bp, Homo sapiens
  misc_feature (1)..(1005): n=a,t,g or c
ngggtttacgcagcncnccaagaggnttgnaccncgcgatccaagagggatttaagcagcccagagctccagagaaaaagagagcgagaaagaaccacacacagagacggcttaagcgtttacccgaattaaatatatatttttaaaaagaactgttgagttttatcattttcgttaagtgaccgtgcgcagcgctgtaactgcaggatggggaagcagaatagcaaactggcccctgaagtgatggaggacctggtgaagagcacagagtttaatgagcatgaactcaagcagtggtacaaaggatttctcaaggactgtccaagtgggaggctaaatctcgaggaatttcagcagctctatgtgaagttctttccttatggagacgcctccaagtttggccagcatgccttccgaaccttcgacaagattggggacggcaccattgacttccgagagttcatctgcgctctgtccatcacctccaggggnagntttgagcagaagctgaactgggccttcaatatgtatgacctggatggtgatggcaagatcacccnnntggagatgctggagatcatcgaggctatctacaaaatggtaggcactgtgatcatgatgaaaatgaatgaggatggcctgacgcctgagcagcgagtagacaagattttcagcaagatggatangaacaaagatgaccagattacactgggtgaattcagagaagctgcaaagagcgacccttccattgtattacttctccagtgcgacatccagaaatgagctgatgtcaatgctatgggctncncccaagtctcnatgttccattcagtctgcagctattcacacacacacacacacacacacacacacacacacacacacacacacncaaatattgcttggnctacctataaatggacttgcttcttgtgtttgaaacactcgtgtgcatgagaatgtcatttgctaatgaattttaaaagcatacaancaccngccaag

SEQ ID NO: 4843 - DNA, 3111 bp, Homo sapiens
ggagtgcggggcgcccggcgccaggggagccgccacagccatggattgcaaagatagaccagcttttccagttaagaagttaatacaagcccgtctgccgtttaagcgcctgaatcttgtcccaaaggggaaagccgatgacatgtcagacgatcagggtacttctgtgcaaagtaaaagccccgatttagaggcctctttggacaccttggaaaacaactgtcatgtgggttctgacatagactttagaccgaaacttgtcaacgggaagggtcccttagataactttttaagaaatagaatcgaaaccagtattggccagagcacagtcatcattgatttgacagaggactcgaatgagcagccagacagtcttgtggaccacaataaactaaattctgaagcctctccctccagggaggcaataaatggccagcgagaagacactggggatcagcaggggttgttgaaggccattcagaacgacaagttggcatttcctggagagaccctttcagacattccttgcaaaacagaggaggagggtgttggctgtggaggtgcagggaggagaggcgactcccaggaatgttcgccacggagctgcccggagctgacgagtggcccgagaatgtgccccagaaaggagcaggacagttggagtgaagctgggggcatcctgttcaaagggaaggtgcctatggtggtcttgcaggacatcttggctgtgagaccaccgcaaatcaagtcccttccagccacaccccaaggcaagaacatgacccctgagagtgaggtgctggaatctttccccgaagaagactctgtactcagccattcgtccctgagctctccctcttccaccagctcgcccgaggggccgcctgctcccccaaagcagcacagcagtaccagtcccttccccacctccacgcccctccgcagaataactaagaaattcgtcaaaggctctacagagaagaacaagctcagactgcaaagagatcaggagcgtctgggcaagcagctcaagttacgtgcagaaagggaagaaaaggagaagctgaaagaggaggccaagcgggccaaggaggaggccaagaagaagaaggaggaagagaaggagcttaaggaaaaggagaggcgggagaagcgggagaaggatgagaaggagaaggcggagaagcagcggctcaaggaggagcggcgcaaggagagacaggaagccctggaggctaaacttgaggaaaaaaggaaaaaggaagaagagaaacggttaagagaagaagagaagcgcattaaagcagagaaggccgaaatcacgaggttcttccagaaaccaaagactccacaggcccccaagaccctggccggctcctgtgggaagtttgccccctttgaaattaaagagcacatggtcctggcccctcggcgtcggaccgctttccatccagacctctgcagtcagctggaccagctcctccagcagcagagcggcgagttctccttcttgaaagacctcaaaggccggcagcccctgaggtccggacccacgcacgtttccacccggaatgcagatatttttaacagtgatgtcgtcatcgtggagcgtgggaagggcgacggtgttcccgagaggaggaagtttggcaggatgaagctcctgcagttctgtgagaaccaccggcctgcctactggggtacctggaataagaagacggcactcatccgcgcgcgagacccctgggcccaggacacgaagctcctggactatgaggtggacagtgatgaggagtgggaagaagaggagcctggggagtccctgtcccacagtgagggggatgatgatgacgacatgggagaggatgaagatgaggacgatggtttctttgtgccccatgggtacctgtctgaggacgaaggtgtgacagaggagtgtgccgaccctgagaaccataaggtccgccagaaactgaaggccaaggagtgggacgagttcctggctaaggggaagcgctttcgcgtcctgcaacctgtgaagatcggctgcgtgtgggcggctgacagagactgcgcaggcgatgacctgaaggtactgcagcagttcgcagcctgcttcctggagaccctgccggcccaggaggagcagacgcccaaggcctccaagcgggagaggagagacgagcagatcctggcccagctgctgccgctcctgcacggcaatgtgaacgggagcaaggtcatcatccgggagttccaggagcactgccgccggggactgctcagcaaccacaccggcagcccgcggacgccctccaccacctacctgcacacccccacccccagcgaggatgccgccatcccctctaagtcccggctcaagcggctcatttccgagaactcagtgtatgagaagcggcctgacttcaggatgtgctggtacgtgcacccgcaggtgctacagagcttccagcaggagcacctgcccgtgccgtgccagtggagctatgtgacatcggtgccctcggcccccaaagaggacagtggcagcgtcccctccacggggcccagccagggcactcccatctcgctgaagaggaagtcagcgggcagcatgtgcatcacccaattcatgaagaagcgcaggcacgacggccagattggtgctgaagacatggacggcttccaggcagacacggaggaggaggaagaggaggagggcgactgtatgatcgtggatgtcccggatgctgtggaggtccaagccccgtgtggagccgcttccggagctgggggtggtgtgggggtggacaccggcaaggccaccctgaccgcgagcccactgggtgcatcctgagagcaggggtgacgtatgtagaacgcttagggtgtcctccccacagagcagatacttgaaccgactcaattcctgtgtaaagagcactttgtcctgcttcacggacctccccaaagtgtgcagagttctatataggatgctggattagttcctttgatatttgtaaaaattcccccaagagccgcatatgaatctgccctttaataaagcattattgagattgctggcctattggggaagctgcgggcacagga

SEQ ID NO: 4844 - DNA, 1167 bp, Homo sapiens
atgggggacgctcccagccctgaagagaaactgcaccttatcacccggaacctgcaggaggttctgggggaagagaagctgaaggagatactgaaggagcgggaacttaaaatttactggggaacggcaaccacgggcaaaccacatgtggcttactttgtgcccatgtcaaagattgcagacttcttaaaggcagggtgtgaggtaacaattctgtttgcggacctccacgcatacctggataacatgaaagccccatgggaacttctagaactccgagtcagttactatgagaatgtgatcaaagcaatgctggagagcattggtgtgcccttggagaagctcaagttcatcaaaggcactgattaccagctcagcaaagagtacacactagatgtgtacagactctcctccgtggtcacacagcacgattccaagaaggctggagctgaggtggtaaagcaggtggagcaccctttgctgagtggcctcttataccccggactgcaggctttggatgaagagtatttaaaagtagatgcccaatttggaggcattgatcagagaaagattttcacctttgcagagaagtacctccctgcacttggctattcaaaacgggtccatctgatgaatcctatggttccaggattaacaggcagcaaaatgagctcttcagaagaggagtccaagattgatctccttgatcggaaggaggatgtgaagaaaaaactgaagaaggccttctgtgagccaggaaatgtggagaacaatggggttctgtccttcatcaagcatgtcctttttccccttaagtccgagtttgtgatcctacgagatgagaaatggggtggaaacaaaacctacacagcttacgtggacctggaaaaggactttgctgctgaggttgtacatcctggagacctgaagaattctgttgaagtcgcactgaacaagttgctggatccaatccgggaaaagtttaatacccctgccctgaaaaaactggccagcgctgcctacccagatccctcaaagcagaagccaatggccaaaggcctgccaagaattcagaaccagaggaggtcatcccatcccggctggatatccgtgtggggaaaatcatcactgtggagaagcacccagatgcagacagcctgtatgtag

SEQ ID NO: 4845 - DNA, 2442 bp, Homo sapiens; identical to SEQ ID NO: 3732

SEQ ID NO: 4846 - DNA, 2303 bp, Homo sapiens
cccggcgtcccgtcgagcccagccccgccgggggcgctcctcgccgcccgcacgccctccccagccatgtcgtccatcctgcctttcactcccccgatcgtgaagcgcctgctgggctggaagaagggcgagcagaacgggcaggaggagaaatggtgcgagaaggcggtcaagagcctggtcaagaaactcaagaagacggggcagctggacgagctggagaaggccatcaccacgcagaacgtcaacaccaagtgcatcaccatccccaggtccctggatggccggttgcaggtgtcccatcggaaggggctccctcatgtcatctactgccgcctgtggcgatggccagacctgcacagccaccacgagctgcgggccatggagctgtgtgagttcgccttcaatatgaagaaggacgaggtctgcgtgaatccctaccactaccagagagtagagacaccagttctacctcctgtgttggtgccacgccacacagagatcccggccgagttccccccactggacgactacagccattccatccccgaaaacactaacttccccgcaggcatcgagccccagagcaatattccagagaccccaccccctggctacctgagtgaagatggagaaaccagtgaccaccagatgaaccacagcatggacgcaggttctccaaacctatccccgaatccgatgtccccagcacataataacttggacctgcagccagttacctactgcgagccggccttctggtgctccatctcctactacgagctgaaccagcgcgtcggggagacattccacgcctcgcagccatccatgactgtggatggcttcaccgacccctccaattcggagcgcttctgcctagggctgctctccaatgtcaacaggaatgcagcagtggagctgacacggagacacatcggaagaggcgtgcggctctactacatcggaggggaggtcttcgcagagtgcctcagtgacagcgctatttttgtccagtctcccaactgtaaccagcgctatggctggcacccggccaccgtctgcaagatcccaccaggatgcaacctgaagatcttcaacaaccaggagttcgctgccctcctggcccagtcggtcaaccagggctttgaggctgtctaccagttgacccgaatgtgcaccatccgcatgagcttcgtcaaaggctggggagcggagtacaggagacagactgtgaccagtaccccctgctggattgagctgcacctgaatgggcctttgcagtggcttgacaaggtcctcacccagatgggctccccaagcatccgctgttccagtgtgtcttagagacatcaagtatggtaggggagggcaggcttggggaaaatggccatacaggaggtggagaaaattggaactctactcaacccattgttgtcaaggaagaagaaatctttctccctcaactgaaggggtgcacccacctgttttctgaaacacacgagcaaacccagaggtggatgttatgaacagctgtgtctgccaaacacatttaccctttggccccactttgaagggcaagaaatggcgtctgctctggtggcttaagtgagcagaacaggtagtattacaccaccggcaccctccccccagactctttttttgagtgacagctttctgggatgtcacagtccaaccagaaacgcccctctgtctaggactgcagtgtggagttcaccttggaagggcgttctaggtaggaagagcccgcacgatgcagacctcatgcccagctctctgacgcttgtgacagtgcctcttccagtgaacattcccagcccagccccgccccgttgtgagctggatagacttgggatggggagggagggagttttgtctgtctccctcccctctcagaacatactgattgggaggtgcgtgttcagcagaacctgcacacaggacagcgggaaaaatcgatgagcgccacctctttaaaaactcacttacgttgtcctttttcactttgaaaagttggaaggactgctgaggcccagtgcatatgcaatgtatagtgtctattatcacattaatctcaaagagattcgaatgacggtaagtgttctcatgaagcaggaggcccttgtcgtgggatggcatttggtctcaggcagcaccacactgggtgcgtctccagtcatctgtaagagcttgctccagattctgatgcatacggctatattggtttatgtagtcagttgcattcattaaatcaactttatcatatgctcaaaaaaaaaaaaaag

SEQ ID NO: 4847 - DNA, 3492 bp, Homo sapiens; identical to SEQ ID NO: 3105

SEQ ID NO: 4848 - DNA, 1579 bp, Homo sapiens
aaaacactaaggggagcgcgcgaagctgaacttggcgctcgatgggggccgttagccgccctagagcgcgcggagccgcagaggcgtagctggactacaacgcagtgcatctcgggaggccaactcgactggactgggtgagaggacagaggtggctcgatgggcggcccgaaggccggggatcatggcgggaaggcgggcccagccaggttcagccccgccccgacccgccgctccccacccccggccggcctcgcgtgccttcccgcagcactgccgtccccgggatgctgagcgcccaccgtctccccgcagccccctcatgcccggctgcgagctgcccgtgggcacctgcccggacatgtgcccggccgccgagcgcgcccagcgcgaaagggagcaccgcctgcaccgcttggaggtggtgccgggttgccgccaggacccgccccgcgcggatccgcagcgcgcggtgaaggagtacagccgacccgccgccggcaagccccggcccccgcccagccagttgcgtccgccctccgtgctgctggccaccgtgcgctacctggccggtgaggtggcggagagcgccgacatcgcccgcgccgaggtggccagcttcgtggcagaccgcttgcgagctgtgcgcctggacctggcgctgcagggagcgggcgacgccgaggcagcggtggtgctggaggcggcgctggccacgctgctggccgtagtggcgcggctcgggcccgacgcggcgcggggacccgcggacccggtgctgctgcaggcccaggtgcaggagggcttcggctcgctgcggcgctgctacgcgcggggcgccgggccgcacccccgccaacccgccttccagggcctctttctgctctataacctgggtgagtcgggatcctggcggctgggcagagcgtggggacaggagcccaccatgacagtggaggctcggtggaagccctgcatgaggttctacagctgcctgctgccctgcgcgcctgcccgcccctccgcaaggccttggcggtagatgctgccttccgagagggcaatgctgcccgcctgttccgtctgctccagaccctgccctacctgccaagttgcgctgtgcagtgccatgtgggccatgcccgccgggaagccctggcccgcttcgctcgtgcctttagcacccccaagggccagaccttgcctctgggcttcatggtcaacctcttggccctggatggactcagggaagcacgggacctgtgccaggcccacgggctgcccttggacggagaggagagagttgtgttcctgaggggtcgctacgtggaggaagggctaccgcctgccagtacgtgcaaggtgttagtggagagcaaacttcgaggacgtaccctggaggaggtggtcatggcagaggaggaagatgagggcacggacagacctgggtccccagcctgaggagggagcgtgagcctcccagagccccaggactgggccagagcacttaggtttctttttccatggtttccaggtaataaaaggaacttgttttgttggtaaaaaaaaaaaaaaaaaa

SEQ ID NO: 4849 - DNA, 1026 bp, Homo sapiens
cagcatgttgagccgggcagtgtgcggcaccagcaggcagctgcctccggttttggggtatctgggctccaggcagaagcacagcctccccgacctgccctacgactacggcgccctggaacctcacatcaacgcgcagatcatgcagctgcaccacagcaagcaccacgcggcctacgtgaacaacctgaacgtcaccgaggagaagtaccaggaggcgttggccaagggagatgttacagcccagatagctcttcagcctgcactgaagttcaatggtggtggtcatatcaatcatagcattttctggacaaacctcagccctaacggtggtggagaacccaaaggggagttgctggaagccatcaaactggactttggttcctttgacaagtttaaggagaagctgacggctgcatctgttggtgtccaaggctcaggttggggttggcttggtttcaataaggaacggggacacttacaaattgctgcttgtccaaatcaggatccactgcaaggaacaacaggccttattccactgctggggattgatgtgtgggagcacgcttactaccttcagtataaaaatgtcaggcctgattatctaaaagctatttggaatgtaatcaactgggagaatgtaactgaaagatacatggcttgcaaaaagtaaaccacgatcgttatgctgagtatgttaagctctttatgactgtttttgtagtggtatagagtactgcagaatacagtaagctgctctattgtagcatttcttgatgttgcttagtcacttatttcataaacaacttaatgttctgaataatttcttactaaacattttgttattgggcaagtgattgaaaatagtaaatgctttgtgtgattgaatctgattggacattttcttcagagagctaaattacaattgtcatttataaaaccatcaaaaatattccatccatatactttggggacttgtagggatgcctttctagtcctattctattgcagttatagaaaatctag

SEQ ID NO: 4850 - DNA, 2627 bp, Homo sapiens; identical to SEQ ID NO: 3112

SEQ ID NO: 4851 - DNA, 1878 bp, Homo sapiens
gggcgcagcggggcccgtctgcagcaagtgaccgacggccgggacggccgcctgccccctctgccacctggggcggtgcgggcccggagcccggagcccgggtagcgcgtagagccggcgcgatgcacgtgcgctcactgcgagctgcggcgccgcacagcttcgtggcgctctgggcacccctgttcctgctgcgctccgccctggccgacttcagcctggacaacgaggtgcactcgagcttcatccaccggcgcctccgcagccaggagcggcgggagatgcagcgcgagatcctctccattttgggcttgccccaccgcccgcgcccgcacctccagggcaagcacaactcggcacccatgttcatgctggacctgtacaacgccatggcggtggaggagggcggcgggcccggcggccagggcttctcctacccctacaaggccgtcttcagtacccagggcccccctctggccagcctgcaagatagccatttcctcaccgacgccgacatggtcatgagcttcgtcaacctcgtggaacatgacaaggaattcttccacccacgctaccaccatcgagagttccggtttgatctttccaagatcccagaaggggaagctgtcacggcagccgaattccggatctacaaggactacatccgggaacgcttcgacaatgagacgttccggatcagcgtttatcaggtgctccaggagcacttgggcagggaatcggatctcttcctgctcgacagccgtaccctctgggcctcggaggagggctggctggtgtttgacatcacagccaccagcaaccactgggtggtcaatccgcggcacaacctgggcctgcagctctcggtggagacgctggatgggcagagcatcaaccccaagttggcgggcctgattgggcggcacgggccccagaacaagcagcccttcatggtggctttcttcaaggccacggaggtccacttccgcagcatccggtccacggggagcaaacagcgcagccagaaccgctccaagacgcccaagaaccaggaagccctgcggatggccaacgtggcagagaacagcagcagcgaccagaggcaggcctgtaagaagcacgagctgtatgtcagcttccgagacctgggctggcaggactggatcatcgcgcctgaaggctacgccgcctactactgtgagggggagtgtgccttccctctgaactcctacatgaacgccaccaaccacgccatcgtgcagacgctggtccacttcatcaacccggaaacggtgcccaagccctgctgtgcgcccacgcagctcaatgccatctccgtcctctacttcgatgacagctccaacgtcatcctgaagaaatacagaaacatggtggtccgggcctgtggctgccactagctcctccgagaattcagaccctttggggccaagtttttctggatcctccattgctcgccttggccaggaaccagcagaccaactgccttttgtgagaccttcccctccctatccccaactttaaaggtgtgagagtattaggaaacatgagcagcatatggcttttgatcagtttttcagtggcagcatccaatgaacaagatcctacaagctgtgcaggcaaaacctagcaggaaaaaaaaacaacgcataaagaaaaatggccgggccaggtcattggctgggaagtctcagccatgcacggactcgtttccagaggtaattatgagcgcctaccagccaggccacccagccgtgggaggaagggggcgtggcaaggggtgggcacattggtgtctgtgcgaaaggaaaattgacccggaagttcctgtaataaatgtcacaataaaacgaatgaatg

SEQ ID NO: 4852 - DNA, 5994 bp, Homo sapiens; identical to SEQ ID NO: 3748

SEQ ID NO: 4853 - DNA, 1970 bp, Homo sapiens
atattggagtagcaagaggctgggaagccatcacttaccttgcactgagaaagaagacaaaggccagtatgcacagctttcctccactgctgctgctgctgttctggggtgtggtgtctcacagcttcccagcgactctagaaacacaagagcaagatgtggacttagtccagaaatacctggaaaaatactacaacctgaagaatgatgggaggcaagttgaaaagcggagaaatagtggcccagtggttgaaaaattgaagcaaatgcaggaattctttgggctgaaagtgactgggaaaccagatgctgaaaccctgaaggtgatgaagcagcccagatgtggagtgcctgatgtggctcagtttgtcctcactgaggggaaccctcgctgggagcaaacacatctgacctacaggattgaaaattacacgccagatttgccaagagcagatgtggaccatgccattgagaaagccttccaactctggagtaatgtcacacctctgacattcaccaaggtctctgagggtcaagcagacatcatgatatcttttgtcaggggagatcatcgggacaactctccttttgatggacctggaggaaatcttgctcatgcttttcaaccaggcccaggtattggaggggatgctcattttgatgaagatgaaaggtggaccaacaatttcagagagtacaacttacatcgtgttgcggctcatgaactcggccattctcttggactctcccattctactgatatcggggctttgatgtaccctagctacaccttcagtggtgatgttcagctagctcaggatgacattgatggcatccaagccatatatggacgttcccaaaatcctgtccagcccatcggcccacaaaccccaaaagcatgtgacagtaagctaacctttgatgctataactacgattcggggagaagtgatgttctttaaagacagattctacatgcgcacaaatcccttctacccggaagttgagctcaatttcatttctgttttctggccacaactgccaaatgggcttgaagctgcttacgaatttgccgacagagatgaagtccggtttttcaaagggaataagtactgggctgttcagggacagaatgtgctacacggataccccaaggacatctacagctcctttggcttccctagaactgtgaagcatatcgatgctgctctttctgaggaaaacactggaaaaacctacttctttgttgctaacaaatactggaggtatgatgaatataaacgatctatggatccaggttatcccaaaatgatagcacatgactttcctggaattggccacaaagttgatgcagttttcatgaaagatggatttttctatttctttcatggaacaagacaatacaaatttgatcctaaaacgaagagaattttgactctccagaaagctaatagctggttcaactgcaggaaaaattgaacattactaatttgaatggaaaacacatggtgtgagtccaaagaaggtgttttcctgaagaactgtctattttctcagtcatttttaacctctagagtcactgatacacagaatataatcttatttatacctcagtttgcatatttttttactatttagaatgtagccctttttgtactgatataatttagttccacaaatggtgggtacaaaaagtcaagtttgtggcttatggattcatataggccagagttgcaaagatcttttccagagtatgcaactctgacgttgatcccagagagcagcttcagtgacaaacatatcctttcaagacagaaagagacaggagacatgagtctttgccggaggaaaagcagctcaagaacacatgtgcagtcactggtgtcaccctggataggcaagggataactcttctaacacaaaataagtgttttatgtttggaataaagtcaaccttgtttctactgtttt

SEQ ID NO: 4854 - DNA, 2500 bp, Homo sapiens; identical to SEQ ID NO: 3751

SEQ ID NO: 4855 - DNA, 1707 bp, Homo sapiens; identical to SEQ ID NO: 3115

SEQ ID NO: 4856 - DNA, 1812 bp, Homo sapiens
attcatacaggagagaacccctatgaatgccatgaatgtgggaaagccttcagtcggaaataccagcttatttcacaccagagaactcatgcaggagagaagccttatgaatgcaccgactgtggaaaggcttttggtttaaagtcacagcttattatacaccagagaactcatacaggggagaaaccatttgaatgtagtgagtgtcagaaagcctttaatacaaagtcaaacctgattgtacatcagagaactcatacaggagagaaaccctatagttgtaatgaatgtggaaaagcctttacgttcaaatcacagctcattgtacataaaggagtgcacactggagtaaaaccctatggatgcagtcaatgtgcaaaaacctttagtttgaagtcccagctcattgtacatcagagaagtcacacaggagtaaaaccatatggatgcagtgagtgtgggaaagccttcaggagcaagtcataccttattatacatatgagaactcatacaggagagaaaccacatgagtgcagggaatgcgggaaatcctttagtttcaattcacaactcattgtgcatcagagaattcacacaggagaaaatccctatgaatgcagtgaatgtgggaaagcctttaataggaaagaccagctcatttcacatcagcgaactcatgcaggggaaaagccttatgggtgcagtgaatgtgggaaagcttttagcagcaagtcatacctaattatacacatgagaactcattcaggtgaaaaaccatatgaatgtaatgaatgtgggaaagccttcatttggaaatcactactcattgtacatgagcgaactcatgcaggggtcaacccttataaatgcagtcaatgtgagaaatccttcagtgggaaattacgccttcttgtacaccagagaatgcacacaacagagaaaccatatgaatgcagtgagtgtggaaaagccttcattaggaattctcaactcattgtacatcaaagaactcattcaggagagaaaccctatgggtgcaatgaatgtgggaaaaccttctctcaaaaatcaattctcagtgcacatcagagaacacatacaggagagaagccttgtaagtgcactgaatgtgggaaagccttttgttggaagtcacagctcattatgcatcagagaactcatgtagatgacaaacattgataattttacgaaactctgaaaagtggattcacaagagatagaaacaatcatatataaagagaaactctgtaagtggaatcatcttgtcatcttccagaaaactcatactgaatagaactttatgaatgcacagcatatggaaaggcatccacagaaagctgttctttacatgcaaaaagatagtagacaatacacaggaaaactgaatttagtaaccactctgaaaatttttagcagcaagtcatacctttttttaaaaagttcatacaggtgaggaaccatgttaaacgttgtaaagtcattttactaacataagattcacaaagaggaaacttcatgaaccagatgaatatagaatagacttctttgaaattcatagtttacagaattttaatgagagaaattattgagctaatgaatggcagaattaacaaaattacaaacattttatgtatcggaaggatataccttggagggaccatgctatgagggaaagtgtaaatctagaaatgagaaacccctagggaaaaaatatatataggagtgaacatcttatgaatgtaccaaataaaccacagctggactgttaacctcaccttagaagcttcattc

SEQ ID NO: 4857 - DNA, 2905 bp, Homo sapiens
ggccgaatacatcaagcaatggtaacatctttaaatgaagataatgaaagtgtaactgttgaatggatagaaaatggagatacaaaaggcaaagagattgacctggagagcatcttttcacttaaccctgaccttgttcctgatgaagaaattgaacccagtccagaaacacctccacctccagcatcctcagccaaagtaaacaaaattgtaaagaatcgacggactgtagcttctattaagaatgaccctccttcaagagataatagagtggttggttcagcacgtgcacggcccagtcaatttcctgaacagtcttcctctgcacaacagaatggtagtgtttcagatatatctccagttcaagctgcaaaaaaggaatttggacccccttcacgtagaaaatctaattgtgtgaaagaagtagaaaaactgcaagaaaaacgagagaaaaggagattgcaacagcaagaacttagagaaaaaagagcccaggacgttgatgctacaaacccaaattatgaaattatgtgtatgatcagagactttagaggaagtttggattatagaccattaacaacagcagatcctattgatgaacataggatatgtgtgtgtgtaagaaaacgaccactcaataaaaaagaaactcaaatgaaagatcttgatgtaatcacaattcctagtaaagatgttgtgatggtacatgaaccaaaacaaaaagtagatttaacaaggtacctagaaaaccaaacatttcgttttgattatgcctttgatgactcagctcctaatgaaatggtttacaggtttactgctaaaccactagtggaaactatatttgaaaggggaatggctacatgctttgcttatgggcagactggaagtggaaaaactcatactatgggtggtgacttttcaggaaagaaccaagattgttctaaaggaatttatgcattagcagctcgagatgtctttttaatgctaaagaagccaaactataagaagctagaacttcaagtatatgcaaccttctttgaaatttatagtggaaaggtgtttgacttgctaaacaggaaaacaaaattaagagttctagaagatggaaaacagcaggttcaagtggtgggattacaggaacgggaggtcaaatgtgttgaagatgtactgaaactcattgacataggcaacagttgcagaacatccggtcaaacatctgcaaatgcacattcatctcggagccatgcagtgtttcagattattcttagaaggaaaggaaaactacatggcaaattttctctcattgatttggctggaaatgaaagaggagctgatacttccagtgcggacaggcaaactaggcttgaaggtgctgaaattaataaaagccttttagcactcaaggagtgcatcagagccttaggtagaaataaacctcatactcctttccgtgcaagtaaactcactcaggtgttaagagattctttcataggtgaaaactctcgtacctgcatgattgccacaatctctccaggaatggcatcctgtgaaaatactcttaatacattaagatatgcaaatagggtcaaagaattgactgtagatccaactgctgctggtgatgttcgtccaataatgcaccatccaccaaaccagattgatgacttagagacacagtggggtgtggggagttcccctcagagagatgatctaaaacttctttgtgaacaaaatgaagaagaagtctctccacagttgtttactttccacgaagctgtttcacaaatggtagaaatggaagaacaagttgtagaagatcacagggcagtgttccaggaatctattcggtggttagaagatgaaaaggccctcttagagatgactgaagaagtagattatgatgtcgattcatatgctacacaacttgaagctattcttgagcaaaaaatagacattttaactgaactgcgggataaagtgaaatctttccgtgcagctctacaagaggaggaacaagccagcaagcaaatcaacccgaagagaccccgtgccctttaaaccggcatttgctgctaaaggatacccagaaccctcactactgtaacatacaacggttcagctgtaagggccatttgaaagtttggaattttaagtgtctgtggaaaatgttttgtccttcacctgaattacatttcaattttgtgaaacactcttttgtctacaaaatgcttctagtccaggaggcacaaccaagaactgggattaatgaagcattttgtttcatttacacaaatagtgatttacttttggagatccttgtcagttttattttctatttgatgaagtaagactgtggactcaatccagagccagatagtaggggaagccacagcatttccttttaactcagttcaatttttgtagtgagactgagcagttttaaatcctttgcgtgcatgcatacctcatcagtgattgtacataccttgcccactcctagagacagctgtgctcacttttcctgctttgtgccttgattaaggctactgaccctaaatttctgaagcacagccaagaaaaattacattccttgtcattgtaaattacctttgtgtgtacatttttactgtatttgagacattttttgtgtgtgactagttaattttgcaggatgtgccatatcattgaacggaactaaagtctgtgacagtggatatagctgctggaccattccatcttatatgtaaagaaatctggaattattattttaaaaccatataacatgtgattataatttttcttagcattttctttgtaaagaactacaatataaactagttggtgtataataaaaagtaatgaaattctgaagaaaaaaaaaaaaaaaaaaaaaaaaaaaaaaaaa

SEQ ID NO: 4858 - DNA, 1625 bp, Homo sapiens
gcaggagccgcaatgtctcaggctgtgcagacaaacggaactcaaccattaagcaaaacatgggaactcagtttatatgagttacaacgaacacctcaggaggcaataacagatggcttagaaattgtggtttcacctcgaagtctacacagtgaattaatgtgcccaatttgtttggatatgttgaagaacaccatgactacaaaggagtgtttacatcgtttttgtgcagactgcatcatcacagcccttagaagtggcaacaaagaatgtcctacctgtcggaaaaaactagtttccaaaagatcactaaggccagacccaaactttgatgcactcatcagcaaaatttatccaagtcgtgatgagtatgaagctcatcaagagagagtattagccaggatcaacaagcacaataatcagcaagcactcagtcacagcattgaggaaggactgaagatacaggccatgaacagactgcagcgaggcaagaaacaacagattgaaaatggtagtggagcagaagataatggtgacagttcacactgcagtaatgcatccacacatagcaatcaggaagcaggccctagtaacaaacggaccaaaacatctgatgattctgggctagagcttgataataacaatgcagcaatggcaattgatccagtaatggatggtgctagtgaaattgaattagtattcaggcctcatcccacacttatggaaaaagatgacagtgcacagacgagatacataaagacttctggtaacgccactgttgatcacttatccaagtatctggctgtgaggttagctttagaagaacttcgaagcaaaggtgaatcaaaccagatgaaccttgatacagccagtgagaagcagtataccatttatatagcaacagccagtggccagttcactgtattaaatggctctttttctttggaattggtcagtgagaaatactggaaagtgaacaaacccatggaactttattacgcacctacaaaggagcacaaatgagcctttaaaaaccaattctgagactgaacttttttatagcctatttctttaatattaaagatgtactggcattacttttatggacagatcttggatatgttgttcaattttctttctgagccagaatagtttacgctattcaaatcttttcccccttatttaagatttcctttttggaagggactgcaattattcagtatttttttctttcctttaaaaaaatatatctgaagtttcttgtgttttttttttttccccacaaagtgtgtttccacttggagcaccattttgacccaggaatttttcatagtttctgtattcttataagattcagtggctgtccttttcctgctcccctcaaaagatttttagtcatacagaatgttaaatattatgtattctgaccttttttttttcccccggagtcttggtatatttatagttttctatataaactgtagtatcttcatgaagacccaaggctcaaatttactgtccttaaaaacaattctcataggattattcttttcatggtatcttcttccataatatctcattttaaaaagaagttctatatgaactttttgtccattgtcatgcaa

SEQ ID NO: 4859 - DNA, 2379 bp, Homo sapiens
ggaattccggtcggcctctcgcccttcagctacctgtgcgtccctccgtcccgtcccgtcccggggtcaccccggagcctgtccgctatgcggctcctgcctctagccccaggtcggctccggcggggcagcccccgccacctgccctcctgcagcccagcgctgctactgctggtgctgggcggctgcctgggggtcttcggggtggctgcgggaacccggaggcccaacgtggtgctgctcctcacggacgaccaggacgaagtgctcggcggcatgacaccactaaagaaaaccaaagctctcatcggagagatggggatgactttttccagtgcttatgtgccaagtgctctctgctgccccagcagagccagtatcctgacaggaaagtacccacataatcatcacgttgtgaacaacactctggaggggaactgcagtagtaagtcctggcagaagatccaagaaccaaatactttcccagcaattctcagatcaatgtgtggttatcagaccttttttgcagggaaatatttaaatgagtacggagccccagatgcaggtggactagaacacgttcctctgggttggagttactggtatgccttggaaaagaattctaagtattataattacaccctgtctatcaatgggaaggcacggaagcatggtgaaaactatagtgtggactacctgacagatgttttggctaatgtctccttggactttctggactacaagtccaactttgagcccttcttcatgatgatcgccactccagcgcctcattcgccttggacagctgcacctcagtaccagaaggctttccagaatgtctttgcaccaagaaacaagaacttcaacatccatggaacgaacaagcactggttaattaggcaagccaagactccaatgactaattcttcaatacagtttttagataatgcatttaggaaaaggtggcaaactctcctctcagttgatgaccttgtggagaaactggtcaagaggctggagttcactggggagctcaacaacacttacatcttctatacctcagacaatggctatcacacaggacagttttccttgccaatagacaagagacagctgtatgagtttgatatcaaagttccactgttggttcgaggacctgggatcaaaccaaatcagacaagcaagatgctggttgccaacattgacttgggtcctactattttggacattgctggctacgacctaaataagacacagatggatgggatgtccttattgcccattttgagaggtgccagtaacttgacctggcgatcagatgtcctggtggaataccaaggagaaggccgtaacgtcactgacccaacatgcccttccctgagtcctggcgtatctcaatgcttcccagactgtgtatgtgaagatgcttataacaatacctatgcctgtgtgaggacaatgtcagcattgtggaatttgcagtattgcgagtttgatgaccaggaggtgtttgtagaagtctataatctgactgcagacccagaccagatcactaacattgctaaaaccatagacccagagcttttaggaaagatgaactatcggttaatgatgttacagtcctgttctgggccaacctgtcgcactccaggggtttttgaccccggatacaggtttgacccccgtctcatgttcagcaatcgcggcagtgtcaggactcgaagattttccaaacatcttctgtagcgacctcacacagcctctgcagatggatccctgcacgcctctttctgatgaagtgattgtagtaggtgtctgtagctagtcttcaagaccacacctggaagagtttctgggctggctttaagtcctgtttgaaaaagcaacccagtcagctgacttcctcgtgcaatgtgttaaactgtgaactctgcccatgtgtcaggagtggctgtctctggtctcttcctttagctgacaaggacactcctgaggtctttgttctcactgtattttttttatcctggggccacagttcttgattattcctcttgtggttaaagactgaatttgtaaacccattcagataaatggcagtactttaggacacacacaaacacacagatacaccttttgatatgtaagcttgacctaaagtcaaaggacctgtgtagcatttcagattgagcacttcactatcaaaaatactaacatcacatggcttgaagagtaaccatcagagctgaatcatccaagtaagaacaagtaccattgttgattgataagtagagatacattttttatgatgttcatcacagtgtggtaaggttgcaaattcaaaacatgtcacccaagctctgttcatgtttttgtgaattc

SEQ ID NO: 4860 - DNA, 806 bp, Homo sapiens; identical to SEQ ID NO: 436

SEQ ID NO: 4861 - DNA, 1306 bp, Homo sapiens; identical to SEQ ID NO: 3759

SEQ ID NO: 4862 - DNA, 1496 bp, Homo sapiens
gggccggcggctgcggcggctggagcaggcgagcggcggcggccgatagcgagtgtcagggccggccggggcggcgcttctcggcctgtcgctggtcggcctcctactgtacctcgtgcctgctgcggctgcgctggcctggctggccgtggggactaccgcggcctggtggggactgagccgcgagccccgaggttcgcgccccttgtcctccttcgttcagaaggcgcgacatcggcgaacactgttcgcttcgcctccggccaagtcgacagccaacggaaacctcctagagccgcggaccctgctcgaaggacctgaccctgccgaactgctcctcatgggcagttacctgggcaagcccgggccgccgcagcccgcccccgctccggagggccaggacctgcggaataggcctggccgccgcccgcccgcccggcgccgcgctccacaccgccctccccgccgacccatcgcgttcaccacttttacccctctctccccactcctcttctccgaccctccgggaggccttccccacgggatcgtgggactttaccagatcggtttgtaataacacctcgaagacgctatccgatccatcaggcccagtattcctgtccgggggtacttcccacagtgtgctggaatggttatcacaagaaggctgtgctgtcccctcgcaactccaggatggtgtgtagcccagtgactgtgaggatcgcccctcctgacagaagattttcgcgttctgcgataccagagcagataatcagctcaacactgtcctcaccatcaagtaatgccccagacccatgtgcaaaggagactgtactgagtgccctcaaagagaagaagaagaaaaggacagtggaggaagaagaccaaatattccttgatggccaggaaaataaaagaagctgtcttgtcgacggtctcactgatgcctcttctgcattcaaagttcctcgacccgggccagatacactccagttcacagtggatgtcttccactttgctaatgactccagaaacatgatatacatcacctgccacctgaaggtcaccctagctgagcaggacccagatgaactcaacaaggcctgttccttcagcaagccttccaacagctggttcccagtggaaggcccggctgacatctgtcaatgctgtaacaaaggtgactgtggcactccaagccattccaggaggcagcctcgtgtcgtgagccagtggtccacgtctgcttcccgtaaccgcaggcatgtgacagaagaagcagatgtcaccgtgggggccactgatcttcctggacaggagtggtgaccatgaagtagagcagtgggctttgccttctgacacctcagtggtgctgctgggcgtaggcctggctgtggtggtgtccctgactctgactgctgttatcctggttctcaccaggaggtgtcgcactgcctcccaccctgtgtctgcttccgaataaaagaagaaagcaa

SEQ ID NO: 4863 - DNA, 1025 bp, Homo sapiens; identical to SEQ ID NO: 2057

SEQ ID NO: 4864 - DNA, 794 bp, Homo sapiens; identical to SEQ ID NO: 4830

SEQ ID NO: 4865 - DNA, 2244 bp, Homo sapiens; identical to SEQ ID NO: 4201

SEQ ID NO: 4866 - DNA, 736 bp, Homo sapiens; identical to SEQ ID NO: 2756

SEQ ID NO: 4867 - DNA, 922 bp, Homo sapiens
  misc_feature (1)..(922): n=a,t,g or c
gtgaccctggccaggactgacctggagatgcagatcgaaggcctgaaggaggagctggcctacctgaggaagaaccacgaggaggagatgcttgctctgagaggtcagaccggcggagatgtgaacgtggagatggatgctgcacctggcgtggacctgagccgcatcctgaatgagatgcgtgaccagtacgagcagatggcagagaaaaaccgcagagacgctgagacctggttcctgagcaagaccgaggagctgaacaaagaagtggcctccaacagcgaactggtacagagcagccgcagtgaggtgacggagctccggagggtgctccagggcctggagattgagctgcagtcccagctcagcacgaaagcatccctggagaacagcctggaggagaccaaaggccgctactgcatgcagctgtcccagatccagggactgattggcagtgtggaggagcagctggcccagctacgctgtgagatggagcagcagagccaggagtaccagatcttgctggatgtgaagacgcggctggagcatgagattgccacctaccgccgcctgctgganggcgaggatgcccacctttcctcccagcaagcatctggccaatcctattcttcccgcgaggtcttcacctcctcctcgtcctcttcgagccgtcagacccgacccatcctcaaggagcagagctcatccagcttcagccagggccagagttcctagaactgagctgcctctaccacagcctcctgcccaccagctggcctcacctcctgaaggcccgggtcaggaccctgctctcctggcgcagttcccagctatctcccctnctcctctgctggtggtgggctaataaagctgactttctggttgatgcaaaaaaaaaaaaaaaaaaaaaaaaaaaaaaaaa

SEQ ID NO: 4868 - DNA, 1284 bp, Homo sapiens
cctctgcttcctctaggaacacaggagttccagatcacatcgagttcaccatgaattcactcagtgaagccaacaccaagttcatgttcgatctgttccaacagttcagaaaatcaaaagagaacaacatcttctattcccctatcagcatcacatcagcattagggatggtcctcttaggagccaaagacaacactgcacaacaaattagcaaggttcttcactttgatcaagtcacagagaacaccacagaaaaagctgcaacatatcatgttgataggtcaggaaatgttcatcaccagtttcaaaagcttctgactgaattcaacaaatccactgatgcatatgagctgaagatcgccaacaagctcttcggagaaaagacgtatcaatttttacaggaatatttagatgccatcaagaaattttaccagaccagtgtggaatctactgattttgcaaatgctccagaagaaagtcgaaagaagattaactcctgggtggaaagtcaaacgaatgaaaaaattaaaaacctatttcctgatgggactattggcaatgatacgacactggttcttgtgaacgcaatctatttcaaagggcagtgggagaataaatttaaaaaagaaaacactaaagaggaaaaattttggccaaacaagaatacatacaaatctgtacagatgatgaggcaatacaattcctttaattttgccttgctggaggatgtacaggccaaggtcctggaaataccatacaaaggcaaagatctaagcatgattgtgctgctgccaaatgaaatcgatggtctgcagaagcttgaagagaaactcactgctgagaaattgatggaatggacaagtttgcagaatatgagagagacatgtgtcgatttacacttacctcggttcaaaatggaagagagctatgacctcaaggacacgttgagaaccatgggaatggtgaatatcttcaatggggatgcagacctctcaggcatgacctggagccacggtctctcagtatctaaagtcctacacaaggcctttgtggaggtcactgaggagggagtggaagctgcagctgccaccgctgtagtagtagtcgaattatcatctccttcaactaatgaagagttctgttgtaatcaccctttcctattcttcataaggcaaaataagaccaacagcatcctcttctatggcagattctcatccccatagatgcaattagtctgtcactccatttagaaaatgttcacctagaggtgttctggtaaactga

SEQ ID NO: 4869 - DNA, 3835 bp, Homo sapiens; identical to SEQ ID NO: 3769

SEQ ID NO: 4870 - DNA, 623 bp, Homo sapiens
gaccaccagttctaagggaccatacagagtattcctctcttcacaccaggaccagccactgttgcagcatgagttcccagcagcagaagcagccctgcatcccaccccctcagcttcagcagcagcaggtgaaacagccttgccagcctccacctcaggaaccatgcatccccaaaaccaaggagccctgccaccccaaggtgcctgagccctgccaccccaaagtgcctgagccctgccagcccaaggttccagagccatgccaccccaaggtgcctgagccctgcccttcaatagtcactccagcaccagcccagcagaagaccaagcagaagtaatgtggtccacagccatgcccttgaggagccggccaccagatgctgaatcccctatcccattctgtgtatgagtcccatttgccttgcaattagcattctgtctcccccaaaaaagaatgtgctatgaagctttctttcctacacactctgagtctctgaatgaagctgaaggtcttagtaccagagctagttttcagctgctcagaattcatctgaagagagacttaagatgaaagcaaatgattcagctcccttatacccccattaaattcactttcaattcca

SEQ ID NO: 4871 - DNA, 683 bp, Homo sapiens; identical to SEQ ID NO: 3771

SEQ ID NO: 4872 - DNA, 1986 bp, Homo sapiens
cgcgccaacgctcgccacagccctctcatctcctggaaccatggccagcacatccaccaccatcaggagccacagcagcagccgccggggtttcagtgccaactcagccaggctccctggggtcagccgctctggcttcagcagcatctccgtgtcccgctccaggggcagtggtggcctgggtggtgcatgtggaggagctggctttggcagccgcagcttatatggcctggggggatccaagaggatctccattggagggggcagctgtgccatcagtggcggctatggcagcagagccagaggcagctatggctttggtggcgccgggagtggatttggtttcggtggtggagccggcattggctttgatctgggtggtggagccggccttgctggtggctttgggggccctggcttccctgtgtgcccccctggaggcatccaagaggtcactgtcaaccagagtctcctgactcccctcaacctgcaaattgaccccgccatccagcgggtgcgggccgaggagcgtgagcagatcaagaccctcaacaacaagtttgcctccttcatcgacaaggtgcggttcctagagcagcagaacaaggttctggacaccaagtggaccctgctgcaggagcagggcaccaagactgtgaggcagaacctggagccgttgttcgagcagtacatcaacaacctcaggaggcagctggacaacatcgtgggggaacggggccgcctggactcggagctgagaaacatgcaggacctggtggaggacctcaagaacaaatatgaggatgaaatcaacaagcgcacagcagcagagaatgaatttgtgactctgaagaaggatgtggatgctgcctacatgaacaaggttgaactgcaagccaaggcagacactctcacagatgagatcaacttcctgagagccttgtatgatgcagagctgtcccagatgcagacccacatctcagacacatccgtggtgctatccatggacaacaaccgcaacctggacctggacagcatcatcgctgaggtcaaggcccaatacgaggagattgctcagaggagccgggctgaggctgagtcctggtaccagaccaagtacgaggagctgcaggtcacagcaggcagacatggggacgacctgcgcaacaccaagcaggagattgctgagatcaaccgcatgatccagaggctgagatctgagatcgaccatgtcaagaagcagtgtgccagcctgcaggctgccattgctgatgctgagcagcgtggggagatggccctcaaggatgctaagaacaagctggaagggctggaggatgccctgcagaaggccaagcaggacctggcccggctgctgaaggagtaccaggagctgatgaatgtcaagctggccctggacgtggagatcgccacctaccgcaagctgctggagggcgaggagtgcaggctgaatggcgaaggcattggacaagtcaacgtctctgtagtacagtccaccatctccagtggctatggcggtgccagtggtgtcggcagtggcttaggcctgggtggaggaagcagctactcctatggcagtggtcttggcattggaggtggcttcagttccagcagtggcagagccattgggggtggcctcagctctgttggaggcggcagttccaccatcaagtacaccaccacctcctcctccagcaggaagagctacaagcactaaagtgctgcctccagctctcggtcccacagtcctcaggcccttctctggctgcagagccgtcttctcaggttgcctgtcgtctcctggcctctagtcttccctgctctccgaggtagagctgggtatggatgcttagtgccctcacttctctctgtctatacctgccccatctgagcacccattgctcaccatcagatcaacctttgattttacatcataatgtattcaccactggagcttcactttgttac

SEQ ID NO: 4873 - DNA, 680 bp, Homo sapiens
aaaaactcctggtacttgagcactgatctgctttggagaacctgattctgagactccagcaggatgtcttatcaacagcagcagtgcaagcagccctgccagccacctcctgtgtgccccacgccaaagtgcccagagccatgtccacccccgaagtgccctgagccctgcccaccaccaaagtgtccacagccctccccacctcagcagtgccagcaaaaatgtcctcctgtgacaccttccccaccctgccagccaaagtgtccacccaagagcaagtaacagcttcagaattcatcaggagcatgaaaggataaggataattggctcaccttgttccacagcttcacctgcatcttctcatcaaagcctaccatggatacacagttagcttctttcctcttagccagtgatctgcccatgatgatccctgatagcaaaaggtttcctttctgaggctgccatattgccactgtccaggtggatactgagaaaggaagtcctcagcagtgtcagttcccagagctttggaagaaggaccagcagctctgtccctgggaaccatcaaaaaatgctgttgatgttttctgtgtctgtctgtcacctgggcatgggcttctaacacctgtgcaattgtcacttttctttcacttccctgaataaatatctttgcatacgta

SEQ ID NO: 4874 - DNA, 847 bp, Homo sapiens; identical to SEQ ID NO: 2766

SEQ ID NO: 4875 - DNA, 9588 bp, Homo sapiens
ccgaccaacaccaacacccagctccgacgcagctcctctgcgcccttgccgccctccgagccacagctttcctcccgctcctgcccccggcccgtcgccgtctccgcgctcgcagcggcctcgggagggcccaggtagcgagcagcgacctcgcgagccttccgcactcccgcccggttccccggccgtccgcctatccttggccccctccgctttctccgcgccggcccgcctcgcttatgcctcggcgctgagccgctctcccgattgcccgccgacatgagctgcaacggaggctcccacccgcggatcaacactctgggccgcatgatccgcgccgagtctggcccggacctgcgctacgaggtgaccagcggcggcgggggcaccagcaggatgtactattctcggcgcggcgtgatcaccgaccagaactcggacggctactgtcaaaccggcacgatgtccaggcaccagaaccagaacaccatccaggagctgctgcagaactgctccgactgcttgatgcgagcagagctcatcgtgcagcctgaattgaagtatggagatggaatacaactgactcggagtcgagaattggatgagtgttttgcccaggccaatgaccaaatggaaatcctcgacagcttgatcagagagatgcggcagatgggccagccctgtgatgcttaccagaaaaggcttcttcagctccaagagcaaatgcgagccctttataaagccatcagtgtccctcgagtccgcagggccagctccaagggtggtggaggctacacttgtcagagtggctctggctgggatgagttcaccaaacatgtcaccagtgaatgtttggggtggatgaggcagcaaagggcggagatggacatggtggcctggggtgtggacctggcctcagtggagcagcacattaacagccaccggggcatccacaactccatcggcgactatcgctggcagctggacaaaatcaaagccgacctgcgcgagaaatctgcgatctaccagttggaggaggagtatgaaaacctgctgaaagcgtcctttgagaggatggatcacctgcgacagctgcagaacatcattcaggccacgtccagggagatcatgtggatcaatgactgcgaggaggaggagctgctgtacgactggagcgacaagaacaccaacatcgctcagaaacaggaggccttctccatacgcatgagtcaactggaagttaaagaaaaagagctcaataagctgaaacaagaaagtgaccaacttgtcctcaatcagcatccagcttcagacaaaattgaggcctatatggacactctgcagacgcagtggagttggattcttcagatcaccaagtgcattgatgttcatctgaaagaaaatgctgcctactttcagttttttgaagaggcgcagtctactgaagcatacctgaaggggctccaggactccatcaggaagaagtacccctgcgacaagaacatgcccctgcagcacctgctggaacagatcaaggagctggagaaagaacgagagaaaatccttgaatacaagcgtcaggtgcagaacttggtaaacaagtctaagaagattgtacagctgaagcctcgtaacccagactacagaagcaataaacccattattctcagagctctctgtgactacaaacaagatcagaaaatcgtgcataagggggatgagtgtatcctgaaggacaacaacgagcgcagcaagtggtacgtgacgggcccgggaggcgttgacatgcttgttccctctgtggggctgatcatccctcctccgaacccactggccgtggacctctcttgcaagattgagcagtactacgaagccatcttggctctgtggaaccagctctacatcaacatgaagagcctggtgtcctggcactactgcatgattgacatagagaagatcagggccatgacaatcgccaagctgaaaacaatgcggcaggaagattacatgaagacgatagccgaccttgagttacattaccaagagttcatcagaaatagccaaggctcagagatgtttggagatgatgacaagcggaaaatacagtctcagttcaccgatgcccagaagcattaccagaccctggtcattcagctccctggctatccccagcaccagacagtgaccacaactgaaatcactcatcatggaacctgccaagatgtcaaccataataaagtaattgaaaccaacagagaaaatgacaagcaagaaacatggatgctgatggagctgcagaagattcgcaggcagatagagcactgcgagggcaggatgactctcaaaaacctccctctagcagaccaggggtcttctcaccacatcacagtgaaaattaacgagcttaagagtgtgcagaatgattcacaagcaattgctgaggttctcaaccagcttaaagatatgcttgccaacttcagaggttctgaaaagtactgctatttacagaatgaagtatttggactatttcagaaactggaaaatatcaatggtgttacagatggctacttaaatagcttatgcacagtaagggcactgctccaggctattctccaaacagaagacatgttaaaggtttatgaagccaggctcactgaggaggaaactgtctgcctggacctggataaagtggaagcttaccgctgtggactgaagaaaataaaaaatgacttgaacttgaagaagtcgttgttggccactatgaagacagaactacagaaagcccagcagatccactctcagacttcacagcagtatccactttatgatctggacttgggcaagttcggtgaaaaagtcacacagctgacagaccgctggcaaaggatagataaacagatcgactttagattatgggacctggagaaacaaatcaagcaattgaggaattatcgtgataactatcaggctttctgcaagtggctctatgatcgtaaacgccgccaggattccttagaatccatgaaatttggagattccaacacagtcatgcggtttttgaatgagcagaagaacttgcacagtgaaatatctggcaaacgagacaaatcagaggaagtacaaaaaattgctgaactttgcgccaattcaattaaggattatgagctccagctggcctcatacacctcaggactggaaactctgctgaacatacctatcaagaggaccatgattcagtccccttctggggtgattctgcaagaggctgcagatgttcatgctcggtacattgaactacttacaagatctggagactattacaggttcttaagtgagatgctgaagagtttggaagatctgaagctgaaaaataccaagatcgaagttttggaagaggagctcagactggcccgagatgccaactcggaaaactgtaataagaacaaattcctggatcagaacctgcagaaataccaggcagagtgttcccagttcaaagcgaagcttgcgagcctggaggagctgaagagacaggctgagctggatgggaagtcggctaagcaaaatctagacaagtgctacggccaaataaaagaactcaatgagaagatcacccgactgacttatgagattgaagatgaaaagagaagaagaaaatctgtggaagacagatttgaccaacagaagaatgactatgaccaactgcagaaagcaaggcaatgtgaaaaggagaaccttggttggcagaaattagagtctgagaaagccatcaaggagaaggagtacgagattgaaaggttgagggttctactgcaggaagaaggcacccggaagagagaatatgaaaatgagctggcaaaggtaagaaaccactataatgaggagatgagtaatttaaggaacaagtatgaaacagagattaacattacgaagaccaccatcaaggagatatccatgcaaaaagaggatgattccaaaaatcttagaaaccagcttgatagactttcaagggaaaatcgagatctgaaggatgaaattgtcaggctcaatgacagcatcttgcaggccactgagcagcgaaggcgagctgaagaaaacgcccttcagcaaaaggcctgtggctctgagataatgcagaagaagcagcatctggagatagaactgaagcaggtcatgcagcagcgctctgaggacaatgcccggcacaagcagtccctggaggaggctgccaagaccattcaggacaaaaataaggagatcgagagactcaaagctgagtttcaggaggaggccaagcgccgctgggaatatgaaaatgaactgagtaaggtaagaaacaattatgatgaggagatcattagcttaaaaaatcagtttgagaccgagatcaacatcaccaagaccaccatccaccagctcaccatgcagaaggaagaggataccagtggctaccgggctcagatagacaatctcacccgagaaaacaggagcttatctgaagaaataaagaggctgaagaacactctaacccagaccacagagaatctcaggagggtggaagaagacatccaacagcaaaaggccactggctctgaggtgtctcagaggaaacagcagctggaggttgagctgagacaagtcactcagatgcgaacagaggagagcgtaagatataagcaatctcttgatgatgctgccaaaaccatccaggataaaaacaaggagatagaaaggttaaaacaactgatcgacaaagaaacaaatgaccggaaatgcctggaagatgaaaacgcgagattacaaagggtccagtatgacctgcagaaagcaaacagtagtgcgacggagacaataaacaaactgaaggttcaggagcaagaactgacacgcctgaggatcgactatgaaagggtttcccaggagaggactgtgaaggaccaggatatcacgcggttccagaactctctgaaagagctgcagctgcagaagcagaaggtggaagaggagctgaatcggctgaagaggaccgcgtcagaagactcctgcaagaggaagaagctggaggaagagctggaaggcatgaggaggtcgctgaaggagcaagccatcaaaatcaccaacctgacccagcagctggagcaggcatccattgttaagaagaggagtgaggatgacctccggcagcagagggacgtgctggatggccacctgagggaaaagcagaggacccaggaagagctgaggaggctctcttctgaggtcgaggccctgaggcggcagttactccaggaacaggaaagtgtcaaacaagctcacttgaggaatgagcatttccagaaggcgatagaagataaaagcagaagcttaaatgaaagcaaaatagaaattgagaggctgcagtctctcacagagaacctgaccaaggagcacttgatgttagaagaagaactgcggaacctgaggctggagtacgatgacctgaggagaggacgaagcgaagcggacagtgataaaaatgcaaccatcttggaactaaggagccagctgcagatcagcaacaaccggaccctggaactgcaggggctgattaatgatttacagagagagagggaaaatttgagacaggaaattgagaaattccaaaagcaggctttagaggcatctaataggattcaggaatcaaagaatcagtgtactcaggtggtacaggaaagagagagccttctggtgaaaatcaaagtcctggagcaagacaaggcaaggctgcagaggctggaggatgagctgaatcgtgcaaaatcaactctagaggcagaaaccagggtgaaacagcgcctggagtgtgagaaacagcaaattcagaatgacctgaatcagtggaagactcaatattcccgcaaggaggaggctattaggaagatagaatcggaaagagaaaagagtgagagagagaagaacagtcttaggagtgagatcgaaagactccaagcagagatcaagagaattgaagagaggtgcaggcgtaagctggaggattctaccagggagacacagtcacagttagaaacagaacgctcccgatatcagagggagattgataaactcagacagcgcccatatgggtcccatcgagagacccagactgagtgtgagtggaccgttgacacctccaagctggtgtttgatgggctgaggaagaaggtgacagcaatgcagctctatgagtgtcagctgatcgacaaaacaaccttggacaaactattgaaggggaagaagtcagtggaagaagttgcttctgaaatccagccattccttcggggtgcaggatctatcgctggagcatctgcttctcctaaggaaaaatactctttggtagaggccaagagaaagaaattaatcagcccagaatccacagtcatgcttctggaggcccaggcagctacaggtggtataattgatccccatcggaatgagaagctgactgtcgacagtgccatagctcgggacctcattgacttcgatgaccgtcagcagatatatgcagcagaaaaagctatcactggttttgatgatccattttcaggcaagacagtatctgtttcagaagccatcaagaaaaatttgattgatagagaaaccggaatgcgcctgctggaagcccagattgcttcagggggtgtagtagaccctgtgaacagtgtctttttgccaaaagatgtcgccttggcccgggggctgattgatagagatttgtatcgatccctgaatgatccccgagatagtcagaaaaactttgtggatccagtcaccaaaaagaaggtcagttacgtgcagctgaaggaacggtgcagaatcgaaccacatactggtctgctcttgctttcagtacagaagagaagcatgtccttccaaggaatcagacaacctgtgaccgtcactgagctagtagattctggtatattgagaccgtccactgtcaatgaactggaatctggtcagatttcttatgacgaggttggtgagagaattaaggacttcctccagggttcaagctgcatagcaggcatatacaatgagaccacaaaacagaagcttggcatttatgaggccatgaaaattggcttagtccgacctggtactgctctggagttgctggaagcccaagcagctactggctttatagtggatcctgttagcaacttgaggttaccagtggaggaagcctacaagagaggtctggtgggcattgagttcaaagagaagctcctgtctgcagaacgagctgtcactgggtataatgatcctgaaacaggaaacatcatctctttgttccaagccatgaataaggaactcatcgaaaagggccacggtattcgcttattagaagcacagatcgcaaccggggggatcattgacccaaaggagagccatcgtttaccagttgacatagcatataagaggggctatttcaatgaggaactcagtgagattctctcagatccaagtgatgataccaaaggattttttgaccccaacactgaagaaaatcttacctatctgcaactaaaagaaagatgcattaaggatgaggaaacagggctctgtcttctgcctctgaaagaaaagaagaaacaggtgcagacatcacaaaagaataccctcaggaagcgtagagtggtcatagttgacccagaaaccaataaagaaatgtctgttcaggaggcctacaagaagggcctaattgattatgaaaccttcaaagaactgtgtgagcaggaatgtgaatgggaagaaataaccatcacgggatcagatggctccaccagggtggtcctggtagatagaaagacaggcagtcagtatgatattcaagatgctattgacaagggccttgttgacaggaagttctttgatcagtaccgatccggcagcctcagcctcactcaatttgctgacatgatctccttgaaaaatggtgtcggcaccagcagcagcatgggcagtggtgtcagcgatgatgtttttagcagctcccgacatgaatcagtaagtaagatttccaccatatccagcgtcaggaatttaaccataaggagcagctctttttcagacaccctggaagaatcgagccccattgcagccatctttgacacagaaaacctggagaaaatctccattacagaaggtatagagcggggcatcgttgacagcatcacgggtcagaggcttctggaggctcaggcctgcacaggtggcatcatccacccaaccacgggccagaagctgtcacttcaggacgcagtctcccagggtgtgattgaccaagacatggccaccagcgtgaagcctgctcagaaagccttcataggcttcgagggtgtgaagggaaagaagaagatgtcagcagcagaggcagtgaaagaaaaatggctcccgtatgaggctggccagcgcttcctggagttccagtacctcacgggaggtcttgttgacccggaagtgcatgggaggataagcaccgaagaagccatccggaaggggttcatagatggccgcgccgcacagaggctgcaagacaccagcagctatgccaaaatcctgacctgccccaaaaccaaattaaaaatatcctataaggatgccataaatcgctccatggtagaagatatcactgggctgcgccttctggaagccgcctccgtgtcgtccaagggcttacccagcccttacaacatgtcttcggctccggggtcccgctccggctcccgctcgggatctcgctccggatctcgctccgggtcccgcagtgggtcccggagaggaagctttgacgccacagggaattcttcctactcttattcctactcatttagcagtagttctattgggcactagtagtcagttgggagtggttgctataccttgacttcatttatatgaatttccactttattaaataatagaaaagaaaatcccggtgcttgcagtagagtgataggacattctatgcttacagaaaatatagccatgattgaaatcaaatagtaaaggctgttctggctttttatcttcttagctcatcttaaataagcagtacacttggatgcagtgcgtctgaagtgctaatcagttgtaacaatagcacaaatcgaacttaggatttgtttcttctcttctgtgtttcgatttttgatcaattctttaattttggaagcctataatacagttttctattcttggagataaaaattaaatggatcactgatattttagtcattctgcttctcatctaaatatttccatattctgtattaggagaaaattaccctcccagcaccagcccccctctcaaacccccaacccaaaaccaagcattttggaatgagtctcctttagtttcagagtgtggattgtataacccatatactcttcgatgtacttgtttggtttggtattaatttgactgtgcatgacagcggcaatcttttctttggtcaaagttttctgtttattttgcttgtcatattcgatgtactttaaggtgtctttatgaagtttgctattctggcaataaacttttagactttt

SEQ ID NO: 4876 - DNA, 1275 bp, Homo sapiens
atggctgccgggccgatctccgagcggaatcaggatgccactgtgtacgtggggggcctggatgagaaggttagtgaaccgctgctgtgggaactgtttctccaggctggaccagtagtcaacacccacatgccaaaggatagagtcactggccagcaccaaggctatggctttgtggaattcttgagtgaggaagatgctgactatgccattaagatcatgaacatgatcaaactctatgggaagccaatacgggtgaacaaagcatcagctcacaacaaaaacctggatgtaggggccaacattttcattgggaacctggaccctgagattgatgagaagttgctttatgatactttcagcgcctttggggtcatcttacaaacccccaaaattatgcgggaccctgacacaggcaactccaaaggttatgcctttattaattttgcttcatttgatgcttcggatgcagcaattgaagccatgaatgggcagtacctctgtaaccgtcctatcaccgtatcttatgccttcaagaaggactccaagggtgagcgccatggctcagcagccgaacgacttctggcagctcagaacccgctctcccaggctgatcgccctcatcagctgtttgcagatgcacctcctccaccctctgctcccaatcctgtggtatcatcattggggtctgggcttcctccaccaggcatgcctcctcctggctccttcccacccccagtgccacctcctggagccctcccacctgggatacccccagccatgcccccaccacctatgcctcctggggctgcaggacatggccccccatcggcaggaaccccaggggcaggacatcctggtcatggacactcacatcctcacccattcccaccgggtgggatgccccatccagggatgtctcagatgcagcttgcacaccatggccctcatggcttaggacatccccacgctggacccccaggctctgggggccagccaccgccccgaccaccacctggaatgcctcatcctggacctcctccaatgggcatgcccccccgagggcctccattcggatctcccatgggtcacccaggtcctatgcctccgcatggtatgcgtggacctcctccactgatgcccccccatggatacactggccctccacgacccccaccctatggctaccagcgggggcctctccctccacccagacccactccccggccaccagttccccctcgaggcccacttcgaggccctctccctcagtaa

SEQ ID NO: 4877 - DNA, 1636 bp, Homo sapiens; identical to SEQ ID NO: 4212

SEQ ID NO: 4878 - DNA, 493 bp, Homo sapiens; identical to SEQ ID NO: 3330

SEQ ID NO: 4879 - DNA, 334 bp, Homo sapiens
gcaagattttacttgaacagtgaaggacaaaaatcatgattgtggaagatatttttaaaatctgattttgcagcgatcacttttaaaccctgtagtgatgtaagactaaaatataattgctaagattttgttggttaatgtaaagatatgacttttctgcactgtactctcttcataggattgtaaaggtgttctaatccaattgcatgatgtagtaagcctcttaaatatgtgtgttaaatatattgagtttgggattaaaatgttgacatgatttcacatttggaaaataaactcatctcttattttggaaaaaaaaaaaaaaaaaaaaaaa

SEQ ID NO: 4880 - DNA, 441 bp, Homo sapiens
  misc_feature (1)..(441): n=a,t,g or c
attaaaacgaaacggcggggctagctgtgtataaatgatccttgctgaatatcttaaggttttttgtaagaaaaaagaaaaaccaacaaaaaaagcttattttcacattaaaatgaaacctcttttgcaacttaagaattctatggaaaagcagtttttatcatattttgtgtccatgcaccatttttcttaaaatggcttacaaaaaagaatgtaaacaatttgtgatctggccagttgtacttttagctcccagaggagacgtntggtggtattatgacgttgagtaaaaaccatccaggggaacttgagggagcagtctgttgccagtaatgttccttgtgtgccattaaaccacctccagatgagtggaggaacatcactttttaattttttaattgtatttggaatngttgccgtgtactaagaacttgncctaan

SEQ ID NO: 4881 - DNA, 387 bp, Homo sapiens
tttaagatagaaaggcagatgatttctttattgtaaagacagcagttacaaaagagaataaatatgacattaggatatatttgttaaaaatacaacaaaaacccctagtatttgtgagcaaccccaagaactcacaagtatgggggataagaacatctacagctggataccctgaaacagatgttagaaactggctaatggtgagtatggccatgactttggggatgtttgaaaggccctggatctgtcacttgggaacgtcagcggtctactgtaatacaatttgcacagagtcagagtgaacaggaacccttttactcattggtatcctaactattctttcgttcttacagtgaagtagtacagtatttaagagtggggaaaagg

SEQ ID NO: 4882 - DNA, 375 bp, Homo sapiens
ccataaaaacagtaaaatgtttattttcttagaaaaaaagtgaggaagagggattcaaaatgattgtgatcacacttccatctgcatctgagcaaagccaatgttgcaagcttaattcttgattaagatacctattaaatcaaacaacctgccactcactcctacgtcacttccaggagtcacatcacagcatgcttttaattgataatagcttctctacttcttctgagcagagaaacaaggcttggcatagcaaccatcccatctccaaagctcaacactgccagtgagaagcaaggctcagtccatctctagactgcgtgcgagagatggggaggaaggagagagggcaggagatgcttgtcttagaagcag

SEQ ID NO: 4883 - DNA, 153 bp, Homo sapiens; identical to SEQ ID NO: 424
  misc_feature (1)..(153): n=a,t,g or c

SEQ ID NO: 4884 - DNA, 451 bp, Homo sapiens
ttttttttaaggatgagaagagattttagttattcagtgttttcagagtttcaacaagggatacagatacaagcagcttcttacagagtttacaatctggggagagaacatgaaagacactgtttaacaggcaaataattccaggaataaatatacatgaatgtgtttttcaaaatacaggttcttatacaaatgtataactaaatactgattccatagtggggtggttgtaactgaaagggctttgagaaaaggctttgaataaaactagtcatccacctagccaaagatcctttccagcagcacaaaaggaatttgtaaggagaacagagattaactgtcagatatctttctaatctgtaaatttatccaaagtttgaaaataccatgaagaatcttaggaatgccagtaaccagggaatgggatatttgcatatcacaacatctacag

SEQ ID NO: 4885 - DNA, 301 bp, Homo sapiens
cgcggtcgaatattatttattgtcagaaaggtacagcattcacaccaatatcagacaaaatagattttaactaaaaaattatttccgagacaaaaataacaatatatgttaataaaaggctcaattaaaaatgtataacaattataaacacatacacatcamaacaacagttccccaaaatacataaagcamacaytgacasgatgaagggagaaatagaccmctctacaatagtagttggggtcttcaacaccccmctyttcamtaataatcacasccacttaagggacccgtgcatacc

SEQ ID NO: 4886 - DNA, 390 bp, Homo sapiens
  misc_feature (1)..(390): n=a,t,g or c
ttttnaccatattcatatatttatagagctagtatgtcaaaaactttacacagtgacaccattagcccctgggccacccctctccttcccacttctgtgttcgaccctacttagaccctcgcacacaaaggttgatcaaaggcagtggccacctcagantagtgcaatgccagtcctgcaggggagaggcctgggnaagggtgagggtgagtntcccacagtccaagacagggtcccagaccttgggcccacccagcgagggacaaaggggcctcaggtnttccaaantttaggcttcatgttaggggcaacttgcccaccatttnttcccttgccattgacaaatttttntagggggattgacctgggggnccagangttangggaagg

SEQ ID NO: 4887 - DNA, 700 bp, Homo sapiens; identical to SEQ ID NO: 712

SEQ ID NO: 4888 - DNA, 314 bp, Homo sapiens; identical to SEQ ID NO: 362

SEQ ID NO: 4889 - DNA, 1023 bp, Homo sapiens
gtcagactggtcatgcaaggtcctgggcctgccttgggtcctggggagccacggaaggttgtgggtgccagagggttgtggtcagagccacagtcaggggccttctgagacctgtgccccctccccaccctccctccccacctccctaggccagctctggggtctcggcaggtggtccgcgacatgacctccgagttcttctctgcccagctccgggcccagatctctgacgacaccactcacccgatctcctactacaagcccgagttctacatgccggatgacgggggcactgctcacctgtctgtggtcgcagaggacggcagtgctgtgtccgccaccagcaccatcaacctctactttggctccaaggtgcgctccccagtcagcgggatcctgctcaataatgaaatggatgacttcagctctaccagcatcaccaacgagtttggggtacccccctcacctgccaatttcatccagccagggaagcagccgctctcgtccatgtgcccgacgatcatggtgggccaggacggccaggtccggatggtggtgggagctgccgggggcacgcagatcaccatggccactgcactggccatcatctacaacctctggttcggctatgacgtgaagtgggccgtggaggagccccggctgcacaaccagcttctgcccaacgtcacgacagtggagagaaacattgaccaggaagtgactgcagccctggagacccggcaccatcacacccagatcacgtccaccttcattgctgtggtgcaagccatcgtccgcatggctggtggctgggcagctgcctcggactccaggaaaggtggggaacctgctggctactgattgctccaggcggacaaggctgacaagcaatccaggaacaaaatactcaccaggacgaggaagaggactttgggggacaggcttctcctgtgagcagcagagcagcacaataaatgaggccactgtgccaggctccaggtggcctccctggcctgtctcccc

SEQ ID NO: 4890 - DNA, 375 bp, Homo sapiens
atccctccagtatttgctgtgggagctcgttttattctttaatttggaattcagtaatttttttttttttttgacgaattcctcccctcacaaaactgttctttcccacctctctccatatctaattcctgattcttgttatttttaagtcataaatgtagccagtcataaatacataaatgttaaccttcgggttgcaaccttgtctcttgcagtttaaggtaatggatattgtagcccatttgaattttcttcactcttattctcgtaattctggagtttcttcagattgtgggtgtattttattgtgctcctatgtaagatgaaggaattaactattaaaattacattttcaacataaaaaaaaaaaaaaaa

SEQ ID NO: 4891 - DNA, 395 bp, Homo sapiens
tttggattcatgcagtctttattaatctgacaaatacagaaaatctgcaatcagctatcaaaattatatcttaccaagaatttgaaaggtatttataaaaaaggtgtattcacagtctgtctgaattaagtacaaagcagtgtccacagaagcagaaggcagacaacatgtgagagtaaatgatcccactgaaaccctcaccccagcacctccaaggacaccaaaaacaagacagtcctgtacttgctactatatgcagctgactttgaaactgcctagtctcaacaattacgtatttcaaaaggaaaattgctttctgggaaatcgtccctgctacacagacacacagaccaactggcaatgctgccaccacatgtcagggctcagggtggacc

SEQ ID NO: 4892 - DNA, 233 bp, Homo sapiens
tttactgtgaaaatctttcttttattactgtctcatgtggcaaaataacattttatacaaataagtcacctagtttactttggacacaaagacaataaaaactggaatgtgattttgggggaagcgggaaggaggaggaaggacagatcaggtcattgatgtttcttatattctgtaaaaaatagatttacaggaaaaaaaatagactttcacaacttcaatgactttacacg

SEQ ID NO: 4893 - DNA, 370 bp, Homo sapiens
tttttttttttttttttctgaaatgatctgtctttattatgtcatcagaaaacaaaaaaatcccccgagtgtaaacaggagaaatgtgctggttaagttactcatcattatcttattattaacaaaataaagcactatctatgtttacagtcataaaaaaagaaacagcctggagagaagtgggggctttgaggatggagagaagacgggggcagacacagactccacatctggccctgtggaatttggggttcccgtactgatccaagggctatttagatcttcagagttaggtgacaatgggatttgatttccttagggaacaaactttgttgaaactgatcagaggctgagatccagtccctagtat

SEQ ID NO: 4894 - DNA, 328 bp, Homo sapiens
ggaaagcattttcaaactttatttacaactgtcacagtgacaaaaagtagtttggaaaaaaaaaaatgctagtttctccctgagcctcaaaaaagaacagatagaagttacaggaggttcatctcacaacaggcatttttactgaaatactaggaattttttcaatacaatcagttagaaatacacacaaattacttgaaaaaaaaaaaaagaggaggccagataggagctcagccacttgtccaagagcagctgggtccccccagcaggctccaccgctgagggtcctgacattagctgtcagcccctggcctgctcagactggcaa

SEQ ID NO: 4895 - DNA, 214 bp, Homo sapiens
tcttcacttaattgcatcacaagtaacaagaatgaaaaaggccacagttcatatattttcaccattacatatgtctataatacttgaaatgagtatggcaaaaccagcactgcacaaagatgagtccacttcaagtcccatgagaaagagcatgtctctaaagaaaaacaaacaaaaccaaagcaaaataaaaagagaggcctaaaggctttgc

SEQ ID NO: 4896 - DNA, 393 bp, Homo sapiens
  misc_feature (1)..(393): n=a,t,g or c
gttgaaanntttatttcanggatttaaatccacccccttccgagaacaccagattaaaagacctccagcaatccatgattctagtatactcatctctgactgctgtatgtaagatgtgatttgattaaagnangacagacaacangtgcatttattagggncaacattctgaatactcacgagtagttatcttgcacacttaaccctaggccagaggacacagggcaaccacacagganaaggntaccagggcagngtcactggagttttgcttataccacaaaaggagttaaggcagtttaattcaaggatgcgaaaactacgtctatgacataaaacntgacattcacaanttaactcagcctttaaanatgtccccaantaccaacnagt

SEQ ID NO: 4897 - DNA, 5102 bp, Homo sapiens
gaattccacttctctgtcgcccgcggttcgccgccccgctcgccgccgcgatgccagtgtttcatacgcgcacgatcgagagcatcctggagccggtggcacagcagatctcccacctggtgataatgcacgaggagggcgaggtggacggcaaagccattcctgacctcaccgcgcccgtggccgccgtgcaggcggccgtcagcaacctcgtccgggttggaaaagagactgttcaaaccactgaggatcagattttgaagagagatatgccaccagcatttattaaggttgagaatgcttgcaccaagcttgtccaggcagctcagatgcttcagtcagacccttactcagtgcctgctcgagattatctaattgatgggtcaaggggcatcctctctggaacatcagacctgctccttaccttcgatgaggctgaggtccgtaaaattattagagtttgcaaaggaattttggaatatcttacagtggcagaggtggtggagactatggaagatttggtcacttacacaaagaatcttgggccaggaatgactaagatggccaagatgattgacgagagacagcaggagctcactcaccaggagcaccgagtgatgttggtgaactcgatgaacaccgtgaaagagttgctgccagttctcatttcagctatgaagatttttgtaacaactaaaaactcaaaaaaccaaggcatagaggaagctttaaaaaatcgcaattttactgtagaaaaaatgagtgctgaaattaatgagataattcgtgtgttacaactcacctcttgggatgaagatgcctgggccagcaaggacactgaagccatgaagagagcattggcctccatagactccaaactgaaccaggccaaaggttggctccgtgaccctagtgcctccccaggggatgctggtgagcaggccatcagacagatcttagatgaagctggaaaagttggtgaactctgtgcaggcaaagaacgcagggagattctgggaacttgcaaaatgctagggcagatgactgatcaagtggctgacctccgtgccagaggacaaggatcctcaccggtggccatgcagaaagctcagcaggtatctcagggtctggatgtgctcacagcaaaagtggaaaatgcagctcgcaagctggaagccatgaccaactcaaagcagagcattgcaaagaagatcgatgctgctcagaactggcttgcagatccaaatggtggaccggaaggagaagagcagattcgaggtgctttggctgaagctcggaaaatagcagaattatgtgatgatcctaaagaaagagatgacattctacgttcccttggggaaatatctgctctgacttctaaattagcagatctacgaagacaggggaaaggagattctccagaggctcgagccttggccaaacaggtggccacggccctgcagaacctgcagaccaaaaccaaccgggctgtggccaacagcagaccggccaaagcagctgtacaccttgagggcaagattgagcaagcacagcggtggattgataatcccacagtggatgaccgtggagtcggtcaggctgccatccgggggcttgtggccgaagggcatcgtctggctaatgttatgatggggccttatcggcaagatcttctcgccaagtgtgaccgagtggaccagctgacagcccagctggctgacctggctgccagaggggaaggggagagtcctcaggcacgagcacttgcatctcagctccaagactccttaaaggatctaaaagctcggatgcaggaggccatgactcaggaagtgtcagatgttttcagcgataccacaactcccatcaagctgttggcagtggcagccacggcgcctcctgatgcgcctaacagggaagaggtatttgatgagagggcagctaactttgaaaaccattcaggaaagcttggtgctacggccgagaaggcggctgcggttggtactgctaataaatcaacagtggaaggcattcaggcctcagtgaagacggcccgagaactcacaccccaggtggtctcggctgctcgtatcttacttaggaaccctggaaatcaagctgcttatgaacattttgagaccatgaagaaccagtggatcgataatgttgaaaaaatgacagggctggtggacgaagccattgataccaaatctctgttggatgcttcagaagaagcaattaaaaaagacctggacaagtgcaaggtagctatggccaacattcagcctcagatgctggttgctggggcaaccagtattgctcgtcgggccaaccggatcctgctggtggctaagagggaggtggagaattccgaggatcccaagttccgtgaggctgtgaaagctgcctctgatgaattgagcaaaaccatctccccaatggtgatggatgcaaaagctgtggctggaaacatttccgaccctggactgcaaaagagcttcctggactcaggatatcggatcctgggagctgtggccaaggtcagagaagccttccaacctcaggagcctgacttcccgccgcctccaccagaccttgaacaactccgactaacagatgagcttgctcctcccaaaccacctctgcctgaaggtgaggtccctccacctaggcctccaccaccagaggaaaaggatgaagagttccctgagcagaaggccggggaggtgattaaccagccaatgatgatggctgccagacagctccatgatgaagctcgcaaatggtccagcaagggcaatgacatcattgcagcagccaagcgcatggctctgctgatggctgagatgtctcggctggtaagagggggcagtggtaccaagcgggcactcattcagtgtgccaaggacatcgccaaggcctcagatgaggtgactcggttggccaaggaggttgccaagcagtgcacagataaacggattagaaccaacctcttacaggtatgtgagcgaatcccaaccataagcacccagctcaaaatcctgtccacagtgaaggccaccatgctgggccggaccaacatcagtgatgaggagtctgagcaggccacagagatgctggttcacaatgcccagaacctcatgcagtctgtgaaggagactgtgcgggaagctgaagctgcttcaatcaaaattcgaacagatgctggatttacactgcgctgggttagaaagactccctggtaccagtaggcacctggctgagcctggctggcacagaaacctctactaaaaagaaggaaaatgatctgagtcccaggagctgcccagagttgctgggagctgaaaaatcacatcctggcctggcacatcagaaaggaatgggggcctcttcaaattagaagacatttatactcttttttcatggacactttgaaatgtgtttctgtataaagcctgtattctcaaacacagttacacttgtgcaccctctatcccaataggcagactgggtttctagcccatggacttcacataagctcagaatccaagtgaacactagccagacactctgctctgcccttgttccctaggggacacttccctctgtttctctttccttggctcccattcactcttccagaatcccaagacccagggcccaggcaaatcagttactaagaagaaaattgctgtgcctcccaaaattgttttgagctttccatgttgctgccaaccataccttccttccctgggctgtgctacctgggtccttttcagaagtgagctttgctgctacaggggaaggtggcctctgtggagccccagcatatgggggcctggattcatttcctgcccttcctcagtttaatccttctagtttcccacaatataaaactgtacttcactgtcaggaagaaatcacagaatcatatgattctgcttttaccatgcccctgagcaatgtctgtgctagggaaactccccgtcccatatcctgcctcagcccgccaaggtagccatcccatgaacacactgtgtcctggtgctctctgccactggaagggcagagtagccagggtgtggccctgccatcttcccagcagggccactcccggcactccatgcttagtcactgcctgcagaggtctgtgctgaggccttatcattcattcttagctcttaattgttcattttgagctgaaatgctgcattttaattttaaccaaaacatgtctcctatatcctggtttttgtagccttcctccacatcctttctaaacaagattttaaagacatgtaggtgtttgttcatctgtaactctaaaagatcctttttaaattcagtcctaagaaagaggagtgcttgtcccctaagagtgtttaatggcaaggcagccctgtctgaaggacacttcctgcctaagggagagtggtatttgcagactagaattctagtgctgctgaagatgaatcaatgggaaatactactcctgtaattcctacctccctgcaaccaactacaaccaagctctctgcatctactcccaagtatggggttcaagagagtaatgggtttcatatttcttatcaccacagtaagttcctactaggcaaaatgagagggcagtgtttcctttttggtacttattactgctaagtatttcccagcacatgaaaccttattttttccaaagccagaaccagatgagtaaaggagtaagaaccttgcctgaacatccttccttcccacccatcgctgtgtgttagttcccaacatcgaatgtgtacaacttaagttggtcctttacactcaggctttcactatttcctttaaaatgaggatgattattttcaaggccctcagcatatttgtatagttgcttgcctgatataaatgcaatattaatgcctttaaagtatgaatctatgccaaagatcacttgttgttttactaaagaaagattacttagaggaaataagaaaaatcatgtttgctctcccggttcttccagtggtttgagacactggtttacactttatgccggatgtgcttttctccaatatcagtgctcgagacacagtgaagcaaattaaaaaaaa

SEQ ID NO: 4898 - DNA, 2786 bp, Homo sapiens; identical to SEQ ID NO: 826

SEQ ID NO: 4899 - DNA, 307 bp, Homo sapiens
gcgagtctggaactctttcttcggggccccggggcacaccatggaggtctcctgttgaatggcccttgttgccctagagtgggacccagccctcacctcccccagagctaacctgggaggtgctgaaggggcattgggccaccgtaagcaagggaaaaagggcagatcatgcggggagatgaccttgatctttgattgctaccctaaccttgacctttaacccgtgattcccccagctcctggagagatgtctaatatctcttagggaccagaccctaaattctctctccccatttgatgttagtgg

SEQ ID NO: 4900 - DNA, 428 bp, Homo sapiens; identical to SEQ ID NO: 546

SEQ ID NO: 4901 - DNA, 409 bp, Homo sapiens
tttgatgacttaataatgtaatttatttgaaatacttccagaaaagtttaaggccattatacaaaaacattcatttcatcaaaacattcattgaccaccttcccataggccaacacttgacaaacctcttttcccaacacactggctgatggcttctaaaagtggctgatggcgcctacaaagaatcattcattcttttcttcaccagtaaaggctgttcttggctttcctctgcttctgtctgcagcaggttcacttgctgtatcaataacgacttgagaaagcagttttaaataaacttgtaatagaaaaaattcatcatgtttaagacctataaatacagaaatatgttttacagggtaaaattgatcacaatatccttgttttcaaaaaataataaagtatatac

SEQ ID NO: 4902 - DNA, 1496 bp, Homo sapiens
tcactaaagggaacaaaagctggagctccaccgcggtggcggcccctcagaactagtggatcccccgggctgcaaggaattcggcacgagcgcgcgtcctgcccgtctgtccccgcgggggtcgcccgccacagcccgcggaatgaccacccagcagatagacctccagggcccggggccgtggggcttccgcctcgtggggcgaaaggacttcgagcagcctctcgccatttcccgggtcactcctggaagcaaggcggctctagctaatttatgtattggagatgtaatcacagccattgatggggaaaatactagcaatatgacacacttggaagctcagaacagaatcaaaggctgcacagacaacttgactctcactgtagccagatctgaacataaagtctggtctcctctggtgacggaggaagggaagcgtcatccatacaagatgaatttagcctctgaaccccaggaggtcctgcacataggaagcgcccacaaccgaagtgccatgccctttaccgcctcgcctgcctccagcactactgccagggtcatcacaaaccagtacaacaacccagctggcctctactcttctgaaaatatctccaacttcaacaatgccctggagtcaaagactgctgccagcggggtggaggcgaacagcagacccttagaccatgctcagcctccaagcagccttgtcatcgacaaagaatctgaagtttacaagatgcttcaggagaaacaggagttgaatgagcccccgaaacagtccacgtctttcttggttttgcaggaaatcctggagtctgaagaaaaaggggatcccaacaagccctcaggattcagaagtgttaaagctcctgtcactaaagtggctgcgtcgattggaaatgctcagaagttgcctatgtgtgacaaatgtggcactgggattgttggtgtgtttgtgaagctgcgggaccgtcaccgccaccctgagtgttatgtgtgcactgactgtggcaccaacctgaaacagaagggccatttctttgtggaggatcaaatctactgtgagaagcatgcccgggagcgagtcacaccacctgagggttatgaagtggtcactgtgttccccaagtgagccagcagatctgaccactgttctccagcaggcctctgctgcagcttttctctcagtgttctggccctctcctctcttgaaagttctctgcttactttggttttccctctgcttgtaaaacattgaggcccctccctgccttggttaattgactcacaccagctgtgggatgcccgcttttacaattaaaggaaaactgttgtgttcagtgtcaccttgtcagcaacactgtgtcccttcgcccgccgttcttctctgctgcatttggacatcagccaaatttgaacccaatcaaatataacgtgtctgacactgattttgtttttactcaataaatgtatagactacaaaaaaaaaaaaaaaa

SEQ ID NO: 4903 - DNA, 362 bp, Homo sapiens; identical to SEQ ID NO: 26

SEQ ID NO: 4904 - DNA, 3111 bp, Homo sapiens
ggcacgagcggagagccgcgcagggcgcgggccgcgcggggtggggcagccggagcgcaggcccccgatccccggcgggcgcccccgggcccccgcgcgcgccccggcctccgggagactggcgcatgccacggagcgcccctcgggccgccgccgctcctgcccgggcccctgctgctgctgctgtcgcctgcgcctgctgccccaactcggcgcccgacttcttcatggtgtgcggaggtcatgttcgctccttagcaggcaaacgacttttctcctcgcctcctcgccccgcatgttcaggaccaaacgatctgcgctcgtccggcgtctctggaggagccgtgcgcccggcggcgaggacgaggaggagggcgcagggggaggtggaggaggaggcgagctgcggggagaaggggcgacggacagccgagcgcatggggccggtggcggcggcccgggcagggctggatgctgcctgggcaaggcggtgcgaggtgccaaaggtcaccaccatccccacccgccagccgcgggcgccggcgcggccgggggcgccgaggcggatctgaaggcgctcacgcactcggtgctcaagaaactgaaggagcggcagctggagctgctgctccaggccgtggagtcccgcggcgggacgcgcaccgcgtgcctcctgctgcccggccgcctggactgcaggctgggcccgggggcgcccgccggcgcgcagcctgcgcagccgccctcgtcctactcgctccccctcctgctgtgcaaagtgttcaggtggccggatctcaggcattcctcggaagtcaagaggctgtgttgctgtgaatcttacgggaagatcaaccccgagctggtgtgctgcaacccccatcaccttagccgactctgcgaactagagtctcccccccctccttactccagatacccgatggattttctcaaaccaactgcagactgtccagatgctgtgccttcctccgctgaaacagggggaacgaattatctggcccctggggggctttcagattcccaacttcttctggagcctggggatcggtcacactggtgcgtggtggcatactgggaggagaagacgagagtggggaggctctactgtgtccaggagccctctctggatatcttctatgatctacctcaggggaatggcttttgcctcggacagctcaattcggacaacaagagtcagctggtgcagaaggtgcggagcaaaatcggctgcggcatccagctgacgcgggaggtggatggtgtgtgggtgtacaaccgcagcagttaccccatcttcatcaagtccgccacactggacaacccggactccaggacgctgttggtacacaaggtgttccccggtttctccatcaaggctttcgactacgagaaggcgtacagcctgcagcggcccaatgaccacgagtttatgcagcagccgtggacgggctttaccgtgcagatcagctttgtgaagggctggggtcagtgctacacccgccagttcatcagcagctgcccgtgctggctagaggtcatcttcaacagccggtagccgcgtgcggaggggacagagcgtgagctgagcaggccacacttcaaactactttgctgctaatattttcctcctgagtgcttgcttttcatgcaaactctttggtcgttttttttttgtttgttggttggttttcttcttctcgtcctcgtttgtgttctgttttgtttcgctctttgagaaatagcttatgaaaagaattgttgggggtttttttggaagaaggggcaggtatgatcggcaggacaccctgataggaagaggggaagcagaaatccaagcaccaccaaacacagtgtatgaaggggggcggtcatcatttcacttgtcaggagtgtgtgtgagtgtgagtgtgcggctgtgtgtgcacgcgtgtgcaggagcggcagatggggagacaacgtgctctttgttttgtgtctcttatggatgtccccagcagagaggtttgcagtcccaagcggtgtctctcctgccccttggacacgctcagtggggcagaggcagtacctgggcaagctggcggctggggtcccagcagctgccaggagcacggctctgtccccagcctgggaaagcccctgcccctcctctccctcatcaaggacacgggcctgtccacaggcttctgagcagcgagcctgctagtggccgaaccagaaccaattattttcatccttgtcttattcccttcctgccagcccctgccattgtagcgtctttcttttttggccatctgctcctggatctccctgagatgggcttcccaagggctgccggggcagccccctcacagtattgctcacccagtgccctctcccctcagcctctcccctgcctgccctggtgacatcaggtttttcccggacttagaaaaccagctcagcactgcctgctcccatcctgtgtgttaagctctgctattaggccagcaagcggggatgtccctgggagggacatgcttagcagtccccttccctccaagaaggatttggtccgtcataacccaaggtaccatcctaggctgacacctaactcttctttcatttcttctacaactcatacactcgtatgatacttcgacactgttcttagctcaatgagcatgtttagactttaacataagctatttttctaactacaaaggtttaaatgaacaagagaagcattctcattggaaatttagcattgtagtgctttgagagagaaaggactcctgaaaaaaaacctgagatttattaaagaaaaaaatgtattttatgttatatataaatatattattacttgtaaatataaagacgttttataagcatcattatttatgtattgtgcaatgtgtataaacaagaaaaataaagaaaagatgcactttgctttaatataaatgcaaataacaaatgccaaattaaaaaagataaacacaagattggtgttttttcctatgggtgttatcacctagctgaatgtttttctaaaggagtttatgttccattaaacgatttttaaaatgtacacttgaaaaaaaaaaaaaaaaa

SEQ ID NO: 4905 - DNA, 210 bp, Homo sapiens
gcacccctgaaatcaattccatatcatgtttgaatgccatacattttgcacatgtactgtacataagtaatgcatactgtatttttatatgtgtgcacatttatcatcagatcttttgtacatagtggcagtattgtagctgatcgggaaatgtttgatatctcagcaattttgcatttttgtgtctcaaataaaagacattttgatgta

SEQ ID NO: 4906 - DNA, 439 bp, Homo sapiens
actttggttccagcatcctgtccagcaaagaagcaatcagccaaaatgatacctggaggcttatctgaggccaaacccgccactccagaaatccaggagattgttgataaggttaaaccacagcttgaagaaaaaacaaatgagacttatggaaaattggaagctgtgcagtataaaactcaagttgttgctggaacaaattactacattaaggtacgagcaggtgataataaatatatgcacttgaaagtattcaaaagtcttcccggacaaaatgaggacttggtacttactggataccaggttgacaaaaacaaggatgacgagctgacgggcttttagcagcatgtacccaaagtgttctgattccttcaactggctactgagtcatgatccttgctgataaatataaccatcaataaagaagcattcttttcca

SEQ ID NO: 4907 - DNA, 270 bp, Homo sapiens
  misc_feature (1)..(270): n=a,t,g or c
ctggtgcctaccaaggtgaggtctttatggtgtatagagattggtgagtttcagagccagtntggccagtctagtccctcccctttccctagcccagcacaattccctccattgagggcccacatcacctccagagggaggagggaggggtcagacccccccatagcaccaatctggataggccactctctgacaaaacagagcgagcagtgccttccacaaacggggtaaatggggctaagaaggggggaggccttttcctgtgggaga

SEQ ID NO: 4908 - DNA, 7071 bp, Homo sapiens; identical to SEQ ID NO: 109

SEQ ID NO: 4909 - DNA, 3178 bp, Homo sapiens
  misc_feature (1)..(3178): n=a,t,g or c
agttgagcgcagtcgccgctccagtctatccggcactaggaacagccccgggggcgagacggtccccgccatgtctgcggccatgagggagaggttcgaccggttcctgcacgagaagaactgcatgactgaccttctggccaagctcgaggccaaaaccggcgtgaacaggagcttcatcgctcttggtgtcatcggactggtggccttgtacctggtgttcggttatggagcctctctcctctgcaacctgataggatttggctacccagcctacatctcaattaaagctatagagagtcccaacaaagaagatgatacccagtggctgacctactgggtagtgtatggtgtgttcagcattgctgaattcttctctgatatcttcctgtcatggttccccttctactacatgctgaagtgtggcttcctgttgtggtgcatggccccgagcccttctaatggggctgaactgctctacaagcgcatcatccgtcctttcttcctgaagcacgagtcccagatggacagtgtggtcaaggaccttaaagacaagtccaaagagactgcagatgccatcactaaagaagcgaagaaagctaccgtgaatttactgggtgaagaaaagaagagcacctaaaccagactaaaccagactggatggaaacttcctgccctctctgtaccttcctactggagcttgatgttatattagggactgtggtataattattttaataatgttgccttggaaacattttgagatattaaagattggaatgtgttgtaagtttctttgcttacttttactgtctatatatatagggagcactttaaacttaatgcagtgggcagtgtccacgtttttggaaaatgtattttgcctctgggtaggaaaagatgtatgttgctatcctgcaggaaatataaacttaaaataaaattatataccccacaggctgtgtactttactgggctctccctgcacgnattttctctgtagttacatttaggntaatctttatggttctacttcctntaatgtacaattttatataattcngnaatgtttttaatgtatttgtgcacatgtacatatggaaatgttactgtctgactacancatgcatcatgctcatggggagggagcaggggaaggttgtatgtgtcatttataacttctgtacagtaagaccacctgcaacaagctggaggaaccattgtgctggtgtggtctactaaataatactttaggaaatacgtgattaatatgcaagtgaacaaagtgagaaatgaaatcgaatggagattggcctggttgtttccgtagtatatggcatatgaataccaggatagctttataaagcagttagttagttagttactcactctagtgataaatcgggaaatttacacacacacacacacacacacacacacacacacacacacacacacacacacagagtaccctgtaactctcaattccctgaaaaactagtaatactgtcttatctgctataaactttacatatttgtctattgtcaagatgctacantggannccatttctggttttatcttcanagnggaganacatgttgatttagtcttctttcccaatcttcttttttaanccagtttnaggnncttctgnagatttgnccacctctgattacatgtatgttctngtttgtatcatnagcaacaacatgctaatgncgacacctagctctnagngcaattctgggagantganaggnngtatanagtnncccataatctgcttggcaatagttaagtcaatctatcttcagtttttctctggcctttaaggtcaaacacaagaggcttccctagtttacaagtcagagtcacttgtagtccatttaaatgccctcatccgtattctttgtgttgataagctgcacangactacatagtaagtacagancagtaaagttaanncggatgtctccattgatctgccaantcgntatagagagcaatttgtctggactagaaaatctgagttttacaccatactgttaagagtccttttgaattaaactagactaaaacaagtgtataactaaactaacaagattaaatatccagccagtacagtattttttaaggcaaataaagatgattagctcaccttgagntaacaatcaggtaagatcatnacaatgtctcatgatgtnaanaatattaaagatatcaatactaagtgacagtatcacnnctaatataatatggatcagagcatttattttggggaggaaaacagtggtgattaccggcattttattaaacttaaaactttgtagaaagcaaacaaaattgttcttgggagaaaatcaacttttagattaaaaaaattttaagtanctaggagtatttaaatccttttcccataaataaaagtacagttttcttggtggcagaatgaaaatcagcaacntctagcatatagactatataatcagattgacagcatatagaatatattatcagacaagatgaggaggtacaaaagttactattgctcataatgacttacaggctaaaantagntntaaaatactatattaaattctgaatgcaatttttttttgttcccttgagaccaaaatttaagttaactgttgctggcagtctaagtgtaaatgttaacagcaggagaagttaagaattgagcagttctgttgcatgatttcccaaatgaaatactgccttggctagagtttgaaaaactaattgagcctgtgcctggctagaaaacaagcgtttatttgaatgtgaatagtgtttcaaaggtatgtagttacagaattcctaccaaacagcttaaattcttcaagaaagaattcctgcagcagttattcccttacctgaaggcttcaatcatttggatcaacaactgctactctcgggaagactcctctactcacagctgaagaaaatgagcacacccttcacactgttatcacctatcctgaagatgtgatacactgaatggaaataaatagatgtaaataaaattgagntctcatttaaaaaaaaccatgtgcccaatgggaaaatgacctcatgttgtggtttaaacagcaactgcacccactagcacagcccattgagctancctatatatacatctctgtcagtgcccctc

SEQ ID NO: 4910 - DNA, 471 bp, Homo sapiens
catgaggcctcttgccacactccagaaatacgtgtgcggctgcttttaagaactatgtgtctggtcacttatttctctaaaattatctcattgcctggcaatcagtcttctcttgtatacttgtcctagcacattatgtacatgggaaatgtaaacaaatgtgaaggaggaccagaaaaattagttaatatttaaaaaaatgtattgtgcattttggcttcacatgtttaactttttttaagaaaaaagttgcatgaatggaaaaaaaaatctgtatacagtatctgtaaaaactatcttatctgtttcaattccttgctcatatcccatataatctagaactaaatatggtgtgtggccatatttaaacacctgagagtcaagcagttgagactttgatttgaagcacctcatccttctttcaatgcgaacactatcatatggcattcttactgaggattttgtctaacc

SEQ ID NO: 4911 - DNA, 298 bp, Homo sapiens
ttttttttaaagtaacatttaatgaatacacatttataaaagccatcatcccttaacatggggaaagtgtacaaaaataatgtgaaagtgtaaaaatttttctagaatacaggaaacatatcagcagtaaagaagtttagtttaactttttttttaaatgtaaaatagtttggatctgttaaaaggaatacagttcgcccaaagcacttattttcatctgttgtaaactcattctttctaccttaagtaaactggaggagtcagctgtgttaatatggtcaaattaatttcatagttt

SEQ ID NO: 4912 - DNA, 526 bp, Homo sapiens
  misc_feature (1)..(526): n=a,t,g or c
tttttttttttaggaagagagaaatcatttaatgtggtaagccagtaagatttaagngctnnnnnnnnnnnnnnnnnnnnnnnnnnnnnnnnnnnnnnnnnntntcanatccagcttctgaataagctcaagaactttaacttctatccctatggcctatgcccaggggaagatgggacttaaagggtgtttgtagaaatcatggtagaaaaacttacatacatatgtgtatatatatatagatacaaaaaaaaactatacatatttaaaaatactgcaaggttgtggtttcctgagcaggatggattgggcagacaaaatcagcaatgcccctgctcctgagagaggcctcgccatccctgttccntaagtcttgagtctgcacggttctctgagtcatattgggatccctgatcatctgcagccgggtgtcctaggagcagccacatggnggggggcgaggctcagcggctgggttaggntttctcntaagggttgnatagggggcttcggttaggcccctggt

SEQ ID NO: 4913 - DNA, 305 bp, Homo sapiens
taacaaacaaaactttattttcctttaatacaaaattaaatagcaaggggttttctttgtacagtgataaattagaaatttacagtacagacatcgatgcagacatacttttgtacatccttaaaagcagggtccatttcctttgaaatttagcaattcattcagggcatgtgtagcaggaagtttgcctggtacctctttgtcaaacatctgaaagtcccccagattggcttcaaggttcctggagctgtggggtggcatgaggacccaagaaaggccacagagcatccagcccgactgctgca

SEQ ID NO: 4914 - DNA, 395 bp, Homo sapiens
aacagtagacaataaacttttatttaagaaaactgattcagttgtgttggaaaaaataaagaaatctgatattaaacgttttctaagatcatttgtataggttcagtgtattcataagaagtccaccctgagatgcctgtaaaagtcaaatcgtaattacacttcaaactttaatcctaaattattgacagatagatagatagtgaccaacttaagggtaatcatatatgtgactaacatttgggaggaaacaggaaaacagtggtctcaaaacaacaatatcccagtctccatttgaaagagcatagatcttcggtaaatcattttgaaaactatgtgctttatttcccaaaagatcaaacttaatttttaaaagacacccttttcagaagtat

SEQ ID NO: 4915 - DNA, 292 bp, Homo sapiens; identical to SEQ ID NO: 1024
  misc_feature (1)..(292): n=a,t,g or c

SEQ ID NO: 4916 - DNA, 385 bp, Homo sapiens
aaatgaaatctatgaatttttttattaaggatttgataagctgatataatgaaaacatgtaaatgaaaaacatttacactgactgtacgactagtgtgctaagccattacaatagtttactgacataactggcaagagtaacttggaaaataacttaatccagcagaacaaaaacatcctcagaaaaacatcctcagtagtactgaatatatctctctcatatatctatctatctatctatctatatatatatatatatatagctttgcacaatcagggagcaaggcaccataatgaaatgagcatacatttatgcagaagaaaataatagcaacaaagctgcgagaaaaattgtaacttcatcttcactgagctgtgcataatc

SEQ ID NO: 4917 - DNA, 340 bp, Homo sapiens
ttttatttcaaaaattattttcacacatgattatcatacagtattacaatgtattatgtgcaaaattccatttaaaaaatcatttacaaaaggtaaacccgtatgtgctgagggttctagttcaacaaaagcccaggctaaaaaaggtacaaggtacaaagccaaccaaatgagatgactatgcatctttacacagtacaataacatgtttttgtaactacctgtgttacgtggatacaagaccctcatagtttgtgcacctgcaaactggttttatttaacataagtttaatttcactgcaggttctgataatgtagattgatttttttgtgcattttc

SEQ ID NO: 4918 - DNA, 264 bp, Homo sapiens
tttagcattttatcctcatttttaacctacaaagtgtaatgttctcataaagtattttaataaatatattaaggcttaaggtaattactggtttgagtggcgggtggtttgctttctagcacactagtttacattcggaatcttaaaaatgaaaacatttgccatcttacagtgagtgatacatcacattggcttgccccagtttttgtgttcttttttttttttttcactattcaacatgtcttcgtattatcttccctcgtg

SEQ ID NO: 4919 - DNA, 495 bp, Homo sapiens
  misc_feature (1)..(495): n=a,t,g or c
tgaaagtataaaaatcattttactttaatacaaaatcacataaagaaaggcatgttggctaaatcaaatattcactaaatatcagtgaagtcaccactggaatctcaatagcacattttcctgctttcttttctcccttctgctaaccattgaagaccagggtcatccgtgggagcagatgagtaggacacgcgtctgcacgctggaggccctgggggttgacatgggagcaggaagtggacccccccaccctgcacatcccttctgtttttcttgatttcagtctcactggcccaggcaaatcttcaagggtgtctagttctgcagccagggagaaagtgatgccaagagaacctcgtctcctccctcctcagtctgctttgaagggggaaataaatacacagggcctagtgtggtctggtggtgggcacaggggaaggtgggtttttggccagggcatctttgggaaaggttgtccttcntaggaattcagga

SEQ ID NO: 4920 - DNA, 319 bp, Homo sapiens; identical to SEQ ID NO: 3466

SEQ ID NO: 4921 - DNA, 433 bp, Homo sapiens
gaaattttctaatgaattttattatcaccagcatctttaaaaattaagaggaattctctgagagtatatataaaaaagaaattaaaggcaaatattttgctgttaaggatttaaaaataaacagaaacatagagtataaaattttcatttcactgtcccctcatttaaaattataagaatataagcaaataacatccaatgtcagaagagattcagggtgaccatttgcagtatttagtggcaaattagtagcatcatgaaaaatttcaattcatttaaaaaaatagctttcatttaaataataattacgtttagctttatctctgtatataattagactttcttttggcttagacaattccattttctccaactgggagctgtgaaggatcaagtcctactttcttcattgatacggcaatatcaaataaat

SEQ ID NO: 4922 - DNA, 580 bp, Homo sapiens
  misc_feature (1)..(580): n=a,t,g or c
ggcagttgaggcaggagacatcaagagagtatttgtgccctcctcgggttttaccttccagccgagattcttcccctctctacaaccctctctcctcagcgcttcttctttcttggtttgatcctgactgctgtcatggcgtgccctctggagaaggccctggatgtgatggtgtccaccttccacaagtactcgggcaaagagggtgacaagttcaagctcaacaagtcagaactaaaggagctgctgacccgggagctgcccagcttcttggggaaaaggacagatgaagctgctttccagaagctgatgagcaacttggacagcaacagggacaacgaggtggacttccaagagtactgtgtcttcctgtcctgcatcgccatgatgtgtaacgaattctttgaaggcttcccagataagcagcccaggaagaaatgaaaactcctctgatgtggttggggggtctgccagctggggccctccctgtcgccagtgggcacttttttttttccaccctggctccttcagacacgtgcttgatgctgagcaagttcaataaagattcttggaagtttan

SEQ ID NO: 4923 - DNA, 358 bp, Homo sapiens; identical to SEQ ID NO: 542

SEQ ID NO: 4924 - DNA, 391 bp, Homo sapiens
aattcggaacgaggcgaaacgtggatgtctacacgaaagtctgcaaatatgtggactggatccaggagacgatgaagaacaattagactggacccacccaccacagcccatcaccctccatttccacttggtgtttggttcctgttcactctgttaataagaaaccctaagccaagaccctctacgaacattctttgggcctcctggactacaggagatgctgtcacttaataatcaacctggggttcgaaatcagtgagacctggattcaaattctgccttgaaatattgtgactctgggaatgacaacacctggtttgttctctgttgtatccccagccccaaagacagctcctggccatatatcaaggtttcaataaatatttgctaa

SEQ ID NO: 4925 - DNA, 288 bp, Homo sapiens
aaaaataaagcctctttattggtacctgtaagctcaggtacaaggtgttcccacaagcacacaggctggcaaggcctcctgggcaaggggcaggcccagagcctgcgtttcttggcacagacacagagagaaatggaataaattatagttctgacactcagggacaatgtagaaattatgatgcaaaattaaacattagcaaacaaagggtataaaaaccctcaggagccacccctcgccaactggcctcagggcatgggcaggtgggccacggttgaagtgcagtgc

SEQ ID NO: 4926 - DNA, 415 bp, Homo sapiens
cagttggttcttctgcaaggctgtgatacctgcaaagatatgtaaaatctaatttttctttttttttttttttttgctacagtctttagactaagcatgcaagacatacgactaagtgcaactgagtgaaatgttttttttttaaattttaatcattccctaaaggtttgaactgaggtatgcgtactaacagtttctcatgctgttatctttactcatgtctagctacacatgctgagaatgaactaatctaccagatttttatcctcttttgaataccaaactaaccagcaaccactcagtttagaagcacagggcccccttcccatgaccctgtctggctactgcgtgcacatcatgaagctgcctggaaaagttttttttttttttttttttttttttttttttttttttt

SEQ ID NO: 4927 - DNA, 412 bp, Homo sapiens; identical to SEQ ID NO: 3483

SEQ ID NO: 4928 - DNA, 411 bp, Homo sapiens
ttctcccgcttatgaacatgtatttttatttgccgaatgaaaatcgtggtgtgttgctttgatgaatggaatttcaggctctccctgtgcacagccggtgggcaaaggtcaccttaaatgactttttctccctatctgtctgttaatccccagaccggttgcattttccagttgcttcctgggtgtctgtacatagtttgtctttgtataggagtgagtgtggtgaccgtcaatcccctaatctcccaggttctaatttaacagatgatggctgtatgaggaaaacgatgtaaatagagaatacaaattaaactggatctctgtggcctaggttttgtacatacagaaactgcatggtatttaaattattgtttgtctctgatgatgtatgcagtttcttttaaaacaaac

SEQ ID NO: 4929 - DNA, 386 bp, Homo sapiens
cttaaaaccaactttccatccgagaagcctcctcagtagttactctgctcatgagacagatctgggctccaagccaggaaaggtgaacagaaaccacaagtgtccagccctcggtgctggagtggacgttaattgtcagccaccagactgtcccggcacctacagagaatgtttcacagttctggcatttaaatcctttgatagtggattgtgctgctgttagccttagtttcagtgctttacaagtctcgcttattatctcattggtatttaggtatacaaaacagttgattattcaccacgccaatatctgggtctctgtatctcatgtagaacataagaaaatgggaactaatagggaactttatttatagcatgaaaataaa

SEQ ID NO: 4930 - DNA, 702 bp, Homo sapiens
  misc_feature (1)..(702): n=a,t,g or c
ttagattttatgaacaacttttattaacagaaatcaaacttattgtccaaagtgacaatatatcaaagaaatacataccaaaacctgctgccattatagttgttaacatttttattgcatatttacaatgtgtggaacattataaggatttacagtagaagccaaatttcccagcccttaaaattttaataggaaaaatcgaataaaccatacatatttttgaaaatgagcattagaaacacacagatgattataattctatagactaatacaggtgaatgctgtatgtaatagaacagctgggagaggtaaaagagtggataagagagtcatcagagtgtgaaaaaactacagctgggtggtattgaataaagagacaatattgaaaatatttttaaacgctaaaatgtcccgtaaaagcatagctatcccctatgcnaaactgtgaggtagaatttttcccaccccgttttctgctcttctggccaccatttgggggacttccctgtccaggtgactctctctcacatagctgtacctggggcttactagccatacatgctttccactaccccctcaacctcatcacagaaataacctttcnggtccatgatccngcctaccttaccactgaaacgggtggtgnaagttagtacctnaccaaccngtggnggttcctcnagctacctatcccnagggtgg

SEQ ID NO: 4931 - DNA, 321 bp, Homo sapiens
cttcaattgatgcaactcagtaatttttattgcaactggaagacaatacatcacagaaactttatggtaggtctggggaaaagtgttatttacaataaatgatgaaatagtttgtctttggcaatatgattacatacgaagaatgcaaaatgcaggtatggatgccttccaagcaacaccaagtccctagagttcggctgatcgcgcctgcctccacactgtttctttaggtttacatgaacataacagaacatcacgttctttctcctttatggttctccctttctattcatgatattggcagtttcatacagaaaatac

SEQ ID NO: 4932 - DNA, 417 bp, Homo sapiens
gatattctgccactccagtttattgaaatgagtaaatttatagctttatttgcatacagaaaagtgcatgagaaaataagtatgtacaaaacagttgtgtggctgatcatgactttcaaaaattcaactacctagaaatagttacctccagtttagcacatttaggtatttggacatttaaagtactatttcaagtctgtgtttatagtgactgagtaggaagctgatagaaaattatgccatatatgatcaactattaccattaaacataaaaccacaggactttctacttggggctaatcaatagagggtcatgtggcccctgtcttgtttagcttctgagcatcaccctcttcttccccctcaaggtaacattggatgtggctgattaactcccacaagaacctgagcattaag

SEQ ID NO: 4933 - DNA, 248 bp, Homo sapiens; identical to SEQ ID NO: 742

SEQ ID NO: 4934 - DNA, 417 bp, Homo sapiens
ttttttttttttgagatggagttttgctcttgttgcccaggctagagagcaatggtgcaatctcggctgactgcaacctccgtctccggggttcaagcaattcttctgcttcagcctcctgaacagctgggattacaggcgtgcgccatcatgcccagctaattttgtatttttagtagagatgggtttatacatttttaaagaatggacaatgatgcagatgatttgtgagcattttgatgagaaagtggtgattagaaggatacagcataaatttaattgtaaacatgcttatctagctaacctaatctgtttctgtagaattactggtcatgggagattggatagatgcctaacctatctcaattttaagtaatgtgagcaagtctttaaggtatacataatgataaaatggag

SEQ ID NO: 4935 - DNA, 302 bp, Homo sapiens; identical to SEQ ID NO: 3478

SEQ ID NO: 4936 - DNA, 375 bp, Homo sapiens
ttttctgtgaataggtttattaagaccacctaggagaacctctttggcaactaccacaaattctaggccatttaaaatccaggccaagttcatatttgctctccatgatcaccattacaacaaccacaggtcacacagtattacagaacaaaagcatggtcactttattttacccaaatgcaaatcgtttttcacaaccaagacttttttctttcctacaatgttacaaatgatgtatccaagtccgactgtaatttggagttaaacagggatcatagaaccaaggaattatctctgaagctgctctttgggccactgtgccaccccaacagctctatcctgttgttctttttttaaattaaaaaatcattaaaa

SEQ ID NO: 4937 - DNA, 221 bp, Homo sapiens
  misc_feature (1)..(221): n=a,t,g or c
aaggtttgaacatcaaattttaatcttgaaaccttttatccagtcctcaaattattaacatgaaaaggagtgataaattgcaattttatcattaccatatcactgtgtaacaagcccttgttacaaaatctccctctactgtctgcaaaaaaccaatagaaaacccatacattatattacctaatganctattaacagatgaaattttaaccaactttata

SEQ ID NO: 4938 - DNA, 206 bp, Homo sapiens
gctgccaccaccatgaaagagtggccaccacatctttattgcatactcaggtgaataacttattatacaatgaacactcctccattaggagaccatgcccacttacagaatgcagccgtaaatgcggtaaatctatttacagaggttggggtgcaagatgagagaagtatcagccccaggaatttgaagtgaaaatgatctacaaa

SEQ ID NO: 4939 - DNA, 426 bp, Homo sapiens
ggtggcaatagagagagttatgctacaattatttcttggtttccacttgcaatggttaattaagtccaaaaacagctgtcagaacctcgagagcagaacatgagaaactcagagctctggaccgaaagcagaaagtttgccgggaaaaaaaaagacaacattattaccatcgattcagtgcctggataaagaggaaagcttacttgtttaatggcagccacatgcacgaagatgctaagaagaaaaagaattccaaatcctcaacttttgaggtttcggctctccaatttaactctttggcaacaggaaacaggttttgcaagttcaaggttcactccctatatgtgattataggaattgttgtggaaatggattaacatacccgtctatgcctaaaagataataaaactgaaatatgtcttcaca

SEQ ID NO: 4940 - DNA, 329 bp, Homo sapiens
ttctatatcatatctttattgactccttaataactactacaagctcacttgtgaatcacacctgatgtacaataaataagtcacaattctgaaccacatctatagaaacttgaattcctagtaaatataataattgaggatcttaaagctcaacaagtcaggccttccagtttttcagatgaggaaattaaggcctaaagatatgaagtgacttaccccaaagtaaaagatctagttagtaataggagctgagattgagatccatgacttttaaaacccagattcatgctctctccactaaaccatgtgatcattctaggtagtcaaca

SEQ ID NO: 4941 - DNA, 296 bp, Homo sapiens
  misc_feature (1)..(296): n=a,t,g or c
aacagaaagaaaaaagttcctggacaccagacccacatatggtatttacaaatttggtgtgaaccctgcctctggttctgcccagagctgaagagtgaatctattacagagatcagagctgtcaggataattatcaagtgcagtaaaaaatagcattttgaaaaaaatatatacctttagtattgcctttctagaattaactataagcaagaaaaacttattttttaaagangaaaagaatacttttncactcttacttataagagctggttgtagcagcactactaaagctagtt

SEQ ID NO: 4942 - DNA, 273 bp, Homo sapiens
taacttcacaggaaatttattattttttgaaagggctgagggagactttacaagggtctgaagctggtaactagaaagaaagataaataaaatacgaagccagtatgttgtggcaatattcgagaaaacacactgaaaaaaatctttacagtttaaaactgcttcactttatacataattacaaatgaatatacagcatctgggttttaacccgtcttttttatttaataggatttagcacacaaatgtccatagagcatttgcaaacaagca

SEQ ID NO: 4943 - DNA, 409 bp, Homo sapiens
ttttttttttttttttttttttttgggtttgatgattttatttctcccttcccataaccagtaaaaaaaaaaaaaaaaattacaatcaggcctggtggtggctcacgcctgtgatctcagcactttgggaggctgaggtgggcggattgcttgatctcaggagtttgagaccagcctgagcaacacagcgagacctggtctcaaaattattatacaatcaatgcaagtacaaagattcaatttttaaaaatcaccagagtacaaagacggccacagcccctgcccgggtttaacttacatatatacagagtgggcggggcaggcatggccacagaggtggtattacaaaatatacaaagtggtttctttctttacatttcatagaagaagcctgcctcatttccaaatg

SEQ ID NO: 4944 - DNA, 460 bp, Homo sapiens
  misc_feature (1)..(460): n=a,t,g or c
ttttttttttttttttgaggatgcaattctaccagntctttatttcttaagtggccaatttgattgagaaagtgacaaagcagcagtgaacctctaaaccaattaataaaagtcctctacttacaatccaaaccagtaacctcatcattgtccttatcccaggnaaggcacagggttagacagcaggacagaggaaaacagaggaacacagtcagnaaaggggcatcaacagggacagtntcagnacagcagtgcagggaanttttgcaaatctggattccagggttntaggacggactgttntcccccaccccttcgttattaaacagggnctcattacatgtgggacccagttntggggccatccctggggttttcaatgtttcgctgttttctcacatgggaggnttttctgggtaactcancttcaggcagcaggtttttgggcaatttttcccaa

SEQ ID NO: 4945 - DNA, 4043 bp, Homo sapiens; identical to SEQ ID NO: 656

SEQ ID NO: 4946 - DNA, 377 bp, Homo sapiens
  misc_feature (1)..(377): n=a,t,g or c
tttttttttgctgcaccaaatttaagaacgccctttcaggcaagcagtggtctctagctgttaaaacatttcgttagtggatcacaatagcttctaaaactgcctttctagtaaaggccatcagagaggtaatactaaactgtgcatttgccaaataagaatatgaattgtataaaagctcatttccaatcctagatcaaatggcaaaagttctacaaagttggtttccatgtttgtataaaagctccgactgattttatgtattttgctatgaaattacctttgggtcttataatcagtatacctctactcaggaatgtgcaaatgattttatacagcacgacgctagtaccgctctgtatgacagtaaggttttt

SEQ ID NO: 4947 - DNA, 358 bp, Homo sapiens
tttttttttttcccgtgtatatttaacaatatatatttatatatattttctaaatcagtacattcagtttttaacttgtttttttcttcacaaacagaagaactcttacaatagtagactttctaaaataaatactattaaaatagagcttcaaaataaatattctatacagagaaaacctgtggcaactttgtggtggggtggaaatgggctacagtgagggggaaatgaagttgggatgtggcggggtgggagcctcgagcttttctgtttgtaacatgaaaccaagctgtgggacagtaagaagagaaagcaaggcaagacactgcacgcagttacccacagcagaaaatggcaa

SEQ ID NO: 4948 - DNA, 7869 bp, Homo sapiens
ggcacgaggtttggggcatctccgcggtccggcccggggccccgggatctcggctgtccttcctcccggcataagatgcacatttttctgctctggagccgggaatgaaatattcttgagttcttacaactttatgacgagacccatgtgtggtgctattgagaaattcattgggaagttggaagacatttcaaacaacaggttgttttggtttctatagtacaattggggtggcattctgttttgtgaaaggaggaaggacttaggccagaaaactcatatgctatggttaactggttcccagcctccgagaatcttgttttccatggtgtaaaacttactcagcatcaggataagggataacgactctatggatatacagaatccttcaccatggtaaaactcgcaaacccgctttatactgagtggattttggaggccatcaaaaaagtgaaaaagcagaaacagcgtccttcagaagaaaggatatgcaatgctgtgtcttcatcccatggcttggatcgtaaaactgttttagaacaattggagttgagtgttaaagatggaacaattttaaaagtctcaaataaaggactcaattcctataaagatcctgataatcctgggcgaatagcacttcctaagcctcggaaccatggaaaattggataataaacaaaatgtggattggaataaactgataaagcgggcagttgagggcttggcagagtctggtggctcaactttgaaaagcattgaacgttttttgaaaggtcagaaggatgtgtctgcattattcggaggcagtgctgcctctggctttcaccagcagttacgattggctatcaaacgtgccattggccacggcagactccttaaagatggacctctttatcggctcaacactaaagcaaccaacgtggatgggaaagagagttgtgagtctctttcctgtttacctccagtgtcccttcttccacatgaaaaggataagccggttgctgaaccaatccccatctgtagtttctgtcttggtacaaaagaacaaaaccgagaaaagaagccagaggaactcatctcctgtgccgactgtggcaacagtggccatccatcctgtttaaagttttcccctgaactaacggttcgagtgaaggccttacggtggcagtgcatcgagtgtaaaacatgcagctcctgtcgagatcaaggcaaaaatgcggataacatgctcttttgtgattcatgtgaccgaggttttcacatggagtgttgtgatccgccactcacccgtatgccaaaaggcatgtggatatgtcaaatatgtcgacctaggaaaaaaggacgaaaacttctacaaaagaaggcagcacagataaaacggcgctatactaatccaataggacgtccaaaaaacaggttaaagaaacaaaacacggtatcaaaaggtcccttcagcaaagttcgaactggccctggaaggggtaggaaacgaaaaatcactctttccagccaatcagcatcatcatcatcagaagaaggatatttagagcggatagatggcttggacttctgcagagatagcaatgtctccttgaggttcaacaagaaaaccaaagggctcattgatggccttaccaaattttttaccccttcccctgatgggcggaaagctcggggggaagtggtggactactctgagcaatatcgaatcagaaagaggggcaacaggaaatcaagcacttcagattggcccacagacaatcaggatggctgggatggcaaacaagaaaatgaggagcgactttttgggagccaggaaatcatgactgagaaagatatggaattatttcgtgatatccaagaacaagcactgcagaaagttggagtgactggtccccctgatccacaagtccgctgtccctctgtcattgagtttgggaagtatgaaattcacacctggtactcctccccatatcctcaagaatactcaaggctgcccaaattgtatctttgtgaattttgtctaaaatatatgaaaagtagaactattctgcagcagcacatgaagaaatgtggttggttccatcctcctgccaatgagatttacagaaagaataatatttctgtctttgaggttgatgggaatgtgagtaccatttattgtcaaaacctgtgtcttttggcaaagttgtttcttgaccacaaaaccctctattacgatgtggagccatttcttttttatgtactaacacagaatgatgtcaagggctgccaccttgttggctacttttctaaggaaaagcactgccaacagaagtacaatgtttcctgtataatgattcttcctcaataccagcgtaagggctatggcaggtttctcatcgatttcagttatttgttatcaaagcgtgaaggccaagcagggtctccagagaaaccgttatctgatctgggtcgtctttcctacatggcatattggaaaagtgtaatattggagtgcctttatcaccaaaatgacaagcagatcagcattaagaagttaagcaagttgactggaatctgccctcaagacatcacttccacactccaccacctacgaatgctggacttccgtagtgaccaatttgtgattatccgccgggaaaaacttatccaggatcacatggcaaagcttcagctgaatttgcgacctgtagatgtagatccagaatgtttgcgctggactccagtcatagtgtccaactctgtggtctcagaggaggaagaagaggaggctgaggaaggagaaaacgaagagccacagtgccaggaaagagaattagagatcagtgtgggaaagtctgtgtctcatgagaacaaagaacaagattcttattcagtagaaagtgaaaagaaaccagaagttatggctccagtcagttctacacgtttgagcaaacaagtccttcctcatgatagtcttcctgcaaatagccagccatctcggaggggccgctgggggaggaagaacagaaaaacccaggaacgttttggtgataaagattctaaactgctcttggaagagacgtcttcagctcctcaggaacaatatggagaatgtggggagaaatcagaagccacccaggaacaatacactgaaagtgaagaacagctggtggcttctgaggagcagccaagccaggacgggaaacctgaccttcccaagagaagactcagtgagggggttgagccctggcgaggacagctcaagaaaagccctgaggctctgaagtgcagattaacagaaggaagtgagaggctgccccgtcgctacagtgagggtgacagggctgtcctcaggggcttcagtgagagcagcgaggaggaggaggagccggaaagccctcggtcaagctcgccaccaattctcacaaagcccacgctgaagcgaaagaaaccatttctccaccgaaggaggagagtccgaaagcgcaaacaccacaatagcagtgtagtcacagaaactatttctgagaccactgaagtgttagatgaaccttttgaagattctgactccgagaggccaatgccaagattagaacccacatttgagatcgatgaagaagaggaggaagaggatgaaaatgaacttttccctagagaatacttccgtcgtttgtcttcgcaggatgtactcaggtgtcagtcctcttctaagaggaagtctaaagatgaagaagaagatgaagagtcagatgatgctgatgacactcctatcttaaagccagtatctcttttgcgaaaacgtgatgtgaagaattctcctcttgagccagatacatccacacctttgaaaaagaaaaagggatggcccaaaggcaagagccgcaaaccaatccactggaagaaaagacctggtcgaaaaccaggatttaagttgagtcgggaaatcatgccagtttctactcaagcatgcgtcattgagcccatcgtttccattcctaaagctggacgtaaacccaagatccaggagagtgaagaaactgttgagccaaaagaagacatgcccctacccgaggagaggaaggaggaggaggagatgcaagcagaggcagaagaggctgaagagggtgaggaagaggatgcagccagcagtgaagtcccagcagcctctccagcagacagcagcaatagtcctgagaccgaaaccaaggagcctgaggtggaggaggaagaagagaagccccgtgtctcagaggagcagaggcagtcagaggaggagcagcaggaattagaggagccagagccagaggaggaggaagatgcagctgcagagactgcccagaatgacgaccacgacgctgatgatgaggatgatggccacctggagtccacaaagaaaaaggagctagaggaacagcccacgagggaagatgtcaaggaggagcctggtgttcaagagtcttttttagatgctaatatgcagaagagtagggaaaagataaaggataaagaggaaaccgagctggattccgaagaggagcagccttcccatgacacgtccgtggtgtcagagcagatggctgggtctgaggacgaccacgaagaagactcccacactaaggaagagttaatcgaattaaaagaggaggaagagattcctcatagtgagctggatctggaaactgtacaggcagtgcagtctttgactcaagaagaaagcagtgagcatgagggcgcctaccaggactgtgaggaaactcttgcggcgtgtcagaccctgcagagttacacccaggctgacgaggaccctcagatgtccatggttgaagactgtcatgcgtcagaacataatagccctatctcctccgttcagtctcaccccagccagtcagtccgttcggtcagcagtcccaacgtgcctgcccttgagagtggctacacccagatcagcccagaacaaggatccctgtccgcaccctctatgcagaacatggagaccagccccatgatggatgtgccttccgtatcagaccactctcagcaggtggtggacagcggcttcagtgacctgggcagcattgagagcaccactgaaaactatgagaacccaagcagttacgactccacgatgggcggcagcatctgtgggaacagctcttcccagagcagctgctcctacggtgggctgtcgtcctccagcagcctcacccagagcagctgtgtggtcactcagcagatggccagcatgggcagcagctgcagcatgatgcagcagagcagcgtccagcctgctgccaactgcagcatcaagtcacctcagagctgcgtggtggagaggcctcccagtaaccagcagcagcagccgccaccaccgcctccacagcagccacagccgccgccgccacaaccacaaccagcaccacagcctccaccaccccagcagcagccgcaacagcagccgcagcctcagccccagcagcctccacccccaccccctccccagcagcagcccccgctgtcacagtgtagtatgaataacagtttcaccccagctcctatgatcatggagataccagaatctggaagcactgggaacataagtatctatgagaggattccaggggattttggtgccggcagctactctcaaccatcagccaccttcagcctagccaagctgcagcagctgaccaacaccattatggaccctcatgccatgccttatagccattctcctgctgtgacttcctatgcaaccagtgtttctctgtccaatacaggactggctcagctggctccatctcatcccttagctgggactcctcaagcacaagccaccatgacgccacccccaaacttggcatccactaccatgaacctcacatctcctctgcttcagtgcaacatgtctgccaccaacattggcattcctcacacgcagagattgcaagggcaaatgccagtgaaggggcacatttccatccgctccaagtctgcgccactgccctctgcggctgctcaccagcagcagctgtatggccgtagcccatcggcagttgccatgcaggctggccctcgcgcactggctgttcagcgtggcatgaacatgggggttaatctgatgcctactcccgcctataatgtcaattccatgaatatgaacaccttgaatgccatgaacagctatcgaatgacacagcccatgatgaacagcagttaccatagtaaccctgcctacatgaaccagacagcacagtatcctatgcagatgcagatgggaatgatggggagccaggcctatacccagcagcctatgcagcctaaccctcatgggaacatgatgtacacaggcccctcccatcacagctacatgaacgctgctggcgtgcccaagcagtcactcaacggaccttacatgagaagatgagcaagatgaacttgcaatcaaaaacttaaatatatataaataaaggaaccttttatactgacaaaccagagaaaaatggacctttttccagttaaaatattgctgtagatttagaggaatttttctttggtttattttattttttagaaaacctgatcttctcttttttttgggttcattttgttgtgggttttggttttcttcacaatcttgaacattttacagtagaactcatctaaaaatggatttggggatggggaaacatgcacaaaatcttttcataattaaaaagagccttactttctttacataccacatggacagaatttgtgtaaaagtgaattatctttattttaaaatgtatgtttcccctcactgtttgcagctcccaatgttgtcatttttaaatgttatatacatctcaagggttaaccagaccctttcctccaaacccaacctttcatttcctacttcattccagcaggaggcacttaggggagactcggatggggacatggagaacaacccaagctccttaaacttattattattgttaatattattattattattattaataaagtgaggcaggaaaatgcttctccttttaaaatcccctccactcctcacacacacacacctcttgaaacccttccccaagaatgtttctttatagacggacttcattgaaatctttgttgttcttgaatcaagtgtaatataatttttttcttcttttttaaaatattcccactcagcactcagagacacaaaaatactgtaagtctcaattaacagcagaatctcagagaaaagctgtttgcaatccaaatccagcctttggaggaatagagatggtcaattaacaatcaaaaagaggagattaacctcttgtttttttaccacctggtgaatcagccataacgcacacacacgccacccagcctcttgtttctagtatgtactttgaaatgctaactgagggtcttgatgcttgagcctttgactgataaaactcaaatagcagtccccagtgatttgcctcttaggttctttcttaaattgttggtggatgactgtacattttagtgatttgaaaaataactgacaaaccattgaaacagtttattttatgttggaagagatggcgcagatgtgtgtcagaagggagatcacggtgtgagtttcgtagctatttaagtgatacatacctctagtttttgtatgtcttttgagatcctgagttcatcccctgtgaatcagagtgcacaagcacctctcctgtgagtggctaatgagaagagggacagaccgaccaccagcacagtagggcagatctggacagcagaatgttataacgcaagttcatgtgttgctcccaactccattctcttttctctcgtgcaaccagtttgcccattctcttcctattacttgctccagggataggtaaaaaaaaaa

SEQ ID NO: 4949 - DNA, 488 bp, Homo sapiens; identical to SEQ ID NO: 597

SEQ ID NO: 4950 - DNA, 6478 bp, Homo sapiens
agagcgagcaggggagagcgagaccagttttaaggggaggaccggtgcgagtaaggcagccccgaggctctgctcgcccaccacccaatcctcgcctcccttctgctccaccttctctctctgccctcacctctcccccgaaaaccccctatttagccaaaggaaggaggtcaggggaacgctctcccctccccttccaaaaaacaaaaacagaaaaacccttttccaggccggggaaagcaggagggagaggggccgccgggctggccatggagctgctgtgccacgaggtggacccggtccgcagggccgtgcgggaccgcaacctgctccgagacgaccgcgtcctgcagaacctgctcaccatcgaggagcgctaccttccgcagtgctcctacttcaagtgcgtgcagaaggacatccaaccctacatgcgcagaatggtggccacctggatgctggaggtctgtgaggaacagaagtgcgaagaagaggtcttccctctggccatgaattacctggaccgtttcttggctggggtcccgactccgaagtcccatctgcaactcctgggtgctgtctgcatgttcctggcctccaaactcaaagagaccagcccgctgaccgcggagaagctgtgcatttacaccgacaactccatcaagcctcaggagctgctggagtgggaactggtggtgctggggaagttgaagtggaacctggcagctgtcactcctcatgacttcattgagcacatcttgcgcaagctgccccagcagcgggagaagctgtctctgatccgcaagcatgctcagaccttcattgctctgtgtgccaccgactttaagtttgccatgtacccaccgtcgatgatcgcaactggaagtgtgggagcagccatctgtgggctccagcaggatgaggaagtgagctcgctcacttgtgatgccctgactgagctgctggctaagatcaccaacacagacgtggattgtctcaaagcttgccaggagcagattgaggcggtgctcctcaatagcctgcagcagtaccgtcaggaccaacgtgacggatccaagtcggaggatgaactggaccaagccagcacccctacagacgtgcgggatatcgacctgtgaggatgccagttgggccgaaagagagagacgcgtccataatctggtctcttcttctttctggttgtttttgttctttgtgttttagggtgaaacttaaaaaaaaaattctgcccccacctagatcatatttaaagatcttttagaagtgagagaaaaaggtcctacgaaaacggaataataaaaagcatttggtgcctatttgaagtacagcataagggaatcccttgtatatgcgaacagttattgtttgattatgtaaaagtaatagtaaaatgcttacaggaaaacctgcagagtagttagagaatatgtatgcctgcaatatgggaacaaattagaggagactttttttttcatgttatgagctagcacatacacccccttgtagtataatttcaaggaactgtgtacgccatttatggcatgattagattgcaaagcaatgaactcaagaaggaattgaaataaggagggacatgatggggaaggagtacaaaacaatctctcaacatgattgaaccatttgggatggagaagcacctttgctctcagccacctgttactaagtcaggagtgtagttggatctctacattaatgtcctcttgctgtctacagtagctgctacctaaaaaaagatgttttattttgccagttggacacaggtgattggctcctgggtttcatgttctgtgacatcctgcttcttcttccaaatgcagttcattgcagacaccaccatattgctatctaatggggaaatgtagctatgggccataaccaaaactcacatgaaacggaggcagatggagaccaagggtgggatccagaatggagtcttttctgttattgtatttaaaagggtaatgtggccttggcatttcttcttagaaaaaaactaatttttggtgctgattggcatgtctggttcacagtttagcattgttataaaccattccattcgaaaagcactttgaaaaattgttcccgagcgatagatgggatggtttatgcaagtcatgctgaatactcctcccctcttctcttttgccccctcccttcctgcccccagtctgggttactcttcgcttctggtatctggcgttctttggtacacagttctggtgttcctaccaggactcaagagacaccccttcctgctgacattcccatcacaacattcctcagacaagcctgtaaactaaaatctgttaccatctgatggcacagaaggatcttaattcccatctctatacttctcctttggacatggaaagaaaagttattgctggtgcaaagatagatggctgaacatcagggtgtggcattttgttcccttttccgttttttttttttttattgttgttgttaattttattgcaaagttgtattcagcgtacttgaatttttcttcctctccacttcttagaggcattcagttagcaaagaggttggagcaacaactttttttttttttttttgcacaattgtaattgacaggtaatgaagctatttgttaaaatatttgcctttttaagtaaaaaagaaaaatcagaacagggctatttgaagaattattttatacacagattctgccttgtttcatagtatgagggttgaagacggaaaacaatctaagggtctctcatttttttaattttgttttgttcagtttggtttttttttttttttgcgctgctaagaagctaaagtcatccatccttattcacgttgacagtacctagctgtaatgtttcacagagtgtgctgctattttataaacatttttataatatattattttactgcttaaattccaagtcctgaagtagatggttgagatatgagttcttcgtactggaaaagcccttccgtagtttgttttcttctggtagcatattcatggttgtttttttttttcttttttggttttttggttttttttttttcctctgatcacattcttcaaagacggagtattcttacctcaggtttactggacaaaatcaataactacaaaaggcaatgattcacgcttttgttttcataatacctcacaaccgtacagtttctgcttgggagcccattcgcatgaggaatacagaagcagtgtgagcagggctgactccctctcaggtggaaggcagggcggtctcactcccagggacctttttggtcatggaggccatcgggctcccagttagaccctggtatcctcatcatgatggaaaaaatacattgaaccaagggatcctccctccccttcaaggcagacgttcagtacaaacatttatgcggtaggctcagatgtcgtaatttgcacttaggtaccaggtgtcaggaaacagactaaaaagaattccaccaggctgtttggagatcctcatcttggagctttttcaaaagcggggcttcatctgcaaagggccctttcatcttgaagtttttcccctccgtctttcccctcccctggcatggacaccttgtgtttaggatcatctctgcaggtttcctaggtctgaatctgcgagtagatgaacctgcagcaagcagcgtttatggtgcttccttctccctcctctgtctcaaactgcgcaggcaagcactatgcaagcccaggccctctgctgagcggtactaaacggtcgggttttcaatcacactgaattggcaggataagaaaaataggtcagataagtatgggatgatagttgaagggaggtgaagaggctgcttctctacagaggtgaaattccagatgagtcagtctcttgggaagtgtgtttagaagggttcaggactttgtgagttagcatgaccctaaaattctaggggatttctggtgggacaatgggtggtgaattttgaagttttggagagggaagtggagcagccagcaagtaagctagccagagttttctcaagagccagctttgctcagcacactctcctgggccccaaggagtcccacggaatggggaaagtgggaaccctggagttcttgggaatcttggagcctaaagagaaaccgaggtgcaaattcatttcatggtgactgacccttgagcttaaacagaagcagcaaatgaaagaaccggacaaataaggaagggcacaagcctacccgactctatttacagtctgtaactttccactcttcctgtagtcccgaggcccctgggtccttctagcttttctctttcccatccttggggccttgtgtgatgatgggtgtggggctgccgatgggaaagtcgggggttgttaggcttttctgcctgctcctgcttaaacacaagaaggaatcctggattttgccctctccttagctcttagtctctttggtaggagttttgttccagaggagctctcccccttggatttgaacttgctctttttgttgttgttgttctttctcttctttttcttacctcccactaaaggggttccaaattatcctggtctttttctaccttgttgtgtttctatctcgtctttacttccatctgtttgtttttttctccatcagtgggggccgagttgttcccccagcctgccaaattttgatccttcccctcttttggccaaatcctagggggaagaaatcctagtatgccaaaaatatatgctaagcataattaaactccatgcgggtccataacagccaagaagcctgcaggagaaagccaagggcagttccctccgcagaacaccccatgcgtgctgagaggcgagctccttgaagaaggggctgttcttccaggaggccttattttgaactgcctcaggaccccactggagagcacagcatgccttactactgggtcatccttggtctatgtgctctgtactggaggctctgttctgcctcttatcagccaggtcaggggcacacatggcttaagtgacaaagccagaggagaagacaaccctgacagcatcacgctgcatcccattgctagcaggattggcaactcttcagacggagctgcgcttccctgcagtctagcacctctagggcctctccagactgtgccctgggagctctgggactgaaaggttaagaacataaggcaggatcagatgactctctccaagagggcaggggaattttctctccatgggccacaggggacagggctgggagaagaaatagacttgcaccttatgtcatgtaaataattgattttctagttcaagaagataatattggtagtgtgggaattggaggtaggaaggggaggaagtctgagtaagccagttggcttctaagccaaaaggattcctctttgtttatctctgagacagtccaaccttgagaatagctttaaaagggaaattaatgctgagatgataaagtccccttaagccaacaaaccctctgtagctatagaatgagtgcaggtttctattggtgtggactcagagcaatttacaagagctgttcatgcagccatccatttgtgcaaaatagggtaagaagattcaagaggatatttattacttcctcataccacatggcttttgatgattctggattctaaacaacccagaatggtcatttcaggcacaacgatactacattcgtgtgtgtctgcttttaaacttggctgggctatcagaccctattctcggctcaggttttgagaagccatcagcaaatgtgtacgtgcatgctgtagctgcagcctgcatcccttcgcctgcagcctactttggggaaataaagtgccttactgactgtagccattacagtatccaatgtcttttgacaggtgcctgtccttgaaaaacaaagtttctatttttatttttaattggtttagttcttaactgctggccaactcttacatccccagcaaatcatcgggccattggattttttccattatgttcatcacccttatatcatgtacctcagatctctctctctctcctctctctcagttatatagtttcttgtcttggactttttttttcttttctttttctttttttttttgctttaaaacaagtgtgatgccatatcaagtccatgttattctctcacagtgtactctataagaggtgtgggtgtctgtttggtcaggatgttagaaagtgctgataagtagcatgatcagtgtatgcgaaaaggtttttaggaagtatggcaaaaatgttgtattggctatgatggtgacatgatatagtcagctgccttttaagaggtcttatctgttcagtgttaagtgatttaaaaaaataataacctgttttctgactagtttaaagatggatttgaaaatggttttgaatgcaattaggttatgctatttggacaataaactcaccttgacct

SEQ ID NO: 4951 - DNA, 2038 bp, Homo sapiens; identical to SEQ ID NO: 830

SEQ ID NO: 4952 - DNA, 478 bp, Homo sapiens
cactggtggatgtgaccaaggtatcaatgagctcacaaaatgatggcttcttcgccgtccacctcaaagagggctcagaagcagctagtaaaggagactttctcttcagcagtgatcacctgattgaaatggccaccaagctctatcgcacaactctcagccaaaccaaacagaagctcaatattgagatttccgatgagttcctggtacagttcagacaggacaaagtatgtgtgaagtttattcagggaaaccagaaaaatgggagtgtcccaacatgtaaacgaaaaaacaaccgtctccttgaagttgctgtcccttaactggcgactcctctctactttcatggacttgttcctttgtaatagtgcaatttggttttgttttatttggggttcattgtatgtttgggaatcaccaaaggcttttagagttctttggcaaaataaaaatatttgactaatcaaaaaaaaaaaaa

SEQ ID NO: 4953 - DNA, 385 bp, Homo sapiens
tttgcaaaaacaggataacaacgtcagatagcactttaatatactagaagaccaaatggaactaattttatttcatacatatattttacagtccagtagacaagatatattgtatttctctgctagtaaagtcatattctctccaaatatgtagacaagaggcttaatgtattataaaagtattatgaagagacattaagattgatgcaaactcaaaaaacacactcacacacaagacttttttttctgccatctttcaccctctaactcgcgatggctccacaaggttgacctgttacggctgttcccagacttgatcaccagctggaatacagtgcgtcacatccaggaaacgtgcaccttacatccgtcagttattgaatac

SEQ ID NO: 4954 - DNA, 466 bp, Homo sapiens
ttttttctcaagccgtttttattacacttagtgtattaagacaagtacaaaataaccttgtaattaagatactgtatcagtcaaaaaagaagtcactattgtatgaagagatttacaaatgactaaaatatacaggctgtgacagaattaacagtttgaaagagggttgcttttttcttttagaaatgctaaattttcttaacaagacaaaaatacagtgctctaaatatgcattaccatgaaaacgttaaagaaaagcagtcttaacacttaactactattaacagcctttgccaacacatgcctgcctactccctttcctaactttaaagaactgtttcctctaaggaatactagtgcagcataacccttaaataatttcatttatttttaaagttacaacctacagagaaattaacatcttgtcaatctaataacagtggcaaccattcttcacatgcacttc

SEQ ID NO: 4955 - DNA, 260 bp, Homo sapiens; identical to SEQ ID NO: 3479

SEQ ID NO: 4956 - DNA, 364 bp, Homo sapiens
  misc_feature (1)..(364): n=a,t,g or c
taatggctcaacataatttattttttatgttaaaatgtacagagttcttttgaaagtacttgctagaaaggggaaaaaaaggtattacatacanggggnggnagggaggccggctggccagtgngcgcgtgacatggagagatacaaaggcatctaggcaccccttccccttagcttacaagtcaccatgaacaaagtacaaagaggttacaaaacaggaaaagcaaatntaaacagacaggntagacgtgggcttcctttgtacatgcggcttttagaggcatctgggngctctntttcacacacgctagngatctctttaaagagaatttatctttcttaaaatagtttttaatattctaca

SEQ ID NO: 4957 - DNA, 269 bp, Homo sapiens
aatgtgtcttaatctatccctccagctggcagttactgtttttttaatcccctgaagttgtcctgtaggagacagaaattctttgctgtctgtatcccttggagtaagaaggtagtggcatgggtggagtgtgtgttctttctccaaatctattatgatgtttattaaacacttctgtagcaaagatggtggtagttcttttgttactgaagttgcccttcaccatggctatttgaaagggagatgtacttggacgtttctgaaactct

SEQ ID NO: 4958 - DNA, 267 bp, Homo sapiens
  misc_feature (1)..(267): n=a,t,g or c
gcaaaatgcagtgtaccttaaaagtgtctcacctagaaggcctctacctgtaatcacattaatttttctaaagacaatttggtgttttgaagataaatgtcattagtctatgataatagcatcataggacaattagccattttagacttgaccatatttnctctttttagcatatagccatcttgatatttaggtgggagactactccaatggagcaacagtttcattttacatgattggatttagaaatttacaaattttaaactc

SEQ ID NO: 4959 - DNA, 332 bp, Homo sapiens
gaatgaaagaatccagcagatatttattaagcaagatgaaagtgaaattacaaacacaggtcaacttttaaactcagcactctgttggagtggaggtgcacggtccttcatcataggcagcctatgcgagatgcatcttaggaagggagctttcgctgctcagaaatcaaagctccatcggaggtgtcctactggaggcatcagacaacaagctaaatgacgttagggctacacaacacaaaggggaaagttgacaacaattcaggggctttgagtagtcaagacaattagcttagtacttcaggtcaataaatgctacaatttatgggcaa

SEQ ID NO: 4960 - DNA, 380 bp, Homo sapiens
  misc_feature (1)..(380): n=a,t,g or c
tgctcttaaccacgtttattgagaggggccgggggaaggggatggacggtcctccccgcggcggggttttcagccctcgcgggtgggcagcgtcttgtcctcaggtgtagatgctccagtctcngctcagccaaacactgtcagggcccccagcagggccttcagggcttcacggccccacggcctggggacccagctcagccacacacttctgggagccctctatgaggtggttcacggggatgcccaggctgctcagcaggagcttcangngttgagggtgccgagggggttggccagggtcccggccccggctccgccgccgactccagcgcanncnaggctgggcacagnttggcgagcccactaagaaacacacg

SEQ ID NO: 4961 - DNA, 268 bp, Homo sapiens; identical to SEQ ID NO: 3425
  misc_feature (1)..(268): n=a,t,g or c

SEQ ID NO: 4962 - DNA, 235 bp, Homo sapiens; identical to SEQ ID NO: 661

SEQ ID NO: 4963 - DNA, 240 bp, Homo sapiens
aaatcaatagaaattaggtagatccatttatttytyaaatacaagtataattyysgmaggggtatttsacaaattcagcattaactgccaactctatagacatgttttaacaaaaagcaaaacaaaacaaaacaaaaaaacaaaacaaggcatttactcttggccctttcagtacaggcgaagtgttctatygcatcacaagtgctagtsatgcagtaacagatccaagggcataatatt

SEQ ID NO: 4964 - DNA, 1581 bp, Homo sapiens; identical to SEQ ID NO: 718

SEQ ID NO: 4965 - DNA, 4508 bp, Homo sapiens
  misc_feature (1)..(4508): n=a,t,g or c
gacccaagtacgtcagggctccacggtactgttttctttcctcctaggaagatgggatttccttttgtccaagcactgaaggaaccgacccaaaccagtcttgggggctctgataagatttcagactctggacccttttccatcaggcagtgtctctgctgtatcatcccagttttgcagaggtacttgcaagccatctgacctctctcttttttttccttcagtgctggagggcagttatctcagggttccaatttatccattaataccaaccaaaacatcagcatcaagtccgaaccgatttcacctcctcgggatcgtatgaccccatcgggcttccagcagcagcagcagcagcagcagcagcagccgccgccaccaccgcagccccagccacaacccccgcagccccagccccgacaggaaatggggcgctcccctgtggacagtctgagcagctctagtagctcctatgatggcagtgatcgggaggatccacggggcgacttccattctccaattgtgcttggccgacccccaaacactgaggacagagaaagcccttctgtaaagcgaatgaggatggacgcgtgggtgacctaaggcttccaagctgatgtttgtacttttgtgttactgcagtgacctgccctacatatctaaatcggtaaataaggacatgagttaaatatatttatatgtacatacatatatatatccctttacatatatatgtatgtgggtgtgagtgtgtgtgtatgtgtgggtgtgtgttacatacacagaatcaggcacttacctgcaaactccttgtaggtctgcagatgtgtgtcccatggcagacaaagcaccctgtaggcacagacaagtctggcacttccttggactacttgtttcgtaaagataaccagtttttgcagagaaacgtgtacccatatataattctcccacactagcttgcagaaacctagagggccccctacttgttttatttaactgtgcagtgactgtagttacttaagagaaaatgctttgtagaacagagcagtagaaaagcaggaaccaagaaagcaatactgtacataaaatgtcatttatattttccaacctggcatgggtgtctgttgcaaaggggtgcatgggaaagggctgttgatattaaaaacaaacaaaacaaaaaagccccacacataactgttttgcacgtgcaaaaatgtattgggtcaagaagtgatctttagctaataaagaaagagaatagaaaacacgcatgagatattcagaaaatactagcctagaaatatagagcattaacaaagtaaaattaatatattaagttataattggaatatgtcagaagtttctttttacattcatatcttaaaaattaaagaaactgattttagctcatgtatattttatatgaaagaaaacacccttatgaattgatgactatatataaaattatattcactacttttgaacacattctgctatgaattatttatataagccaaagctatatgttgtaacttttttttagagaatagctttatcttggtttaactctttagttttattttaagaggggaaaacaaaaatatcttgcaagcagaaccttgaaaaaaaaaaagccatgaacacttattctaaatgtaaattaaaagttgagccaaactctttgtgtatatagcatcttaaatatattatcacctttgatgtaagtacctatgtattgtatggtcaccagattaaaaagtatatttttgtggattgccgccaatctggggggaaaaggcgaggtcctttattaagtattcactgtctaatatttactattttggtaaatatactgtactttggattttaattattaggccagtgttttcagaggattgtattaaggggtttctcccctcactggtgggggaatgtgtgatggttacaatggaatcttcggggctgtttgggtnggagcatcaanatattttttgggttgtggtcaataaattggaaaggggcaaaaaaaattgggggttaagtccaacccgaataagaataaaatgtgtttgtaacaagatttaataagccattatttaaaacttcccttttgtgnggnnnaaatgtagaaganaaacctgacctaatttaattaatatnagagaaaatgccaaaatagnagatgagcccaaaggtttaataagtggtaaatgattaggggaaaataatcatggggaaagggatcttttttccttgaccctctgaaaacagaacgatgcagctggttacaaaatcctaccgttatcagctcttctgcacattgcagtgatgctttggtatgcggggagaaacactcttagggtgccggtccttggcatgactcttgccattctaattggaattagtgccaccctcagcttggattttgaacaagccttattctttcaggaagacaactaatggatgatagcaagttcatccacttactgggcttgtgccatgagcaaaattcaaagtcctgtatatctttcattgtagatttttaaatactccttttcctaaaaaactcaagggtttaaaaattgctattttatattttaaatgatattgagcagctacctacaatttctatgtacattttgttccccccccaccaccacccccaaattacgttccttttgacattttcctcatctgctgtttgtgacaagtcatcagccagatttcctgactgacacataggtatgatcagtgcaggagagacctgcgcaccacaggctgcaaactggaggttctgttctcatggcaggttgggcagtaacttttgagagaggccaaaaaaaggaggatgacatgctgtctcctctcttcagatagacattaggctcttattcagaaaggatttttctttaaaaatgtacttactttactgaactacttacaggcacatttcttcataaggccacacctaatccaaacaagacagtctcccaacactgaagttccaaaataatccttaccactttgtaaaccatttatagctttgaaagtgttaagtgattccttcgttattatttatgcatgttcatgaacttctgctggacattggaataggagttaacacattcacatttactgtctattttcttgggtgccttatgagatggccncnctgacagtactccaatagtctttctngctacgcaggnnnataatcagcacaactactgctttctagaatactactactcaaggctcggcgttgggtttaaattacactgcaccaggtaacaatgaactccatttcaggaactgaatatttgactgttaacctttttcccatacgtccagtgtggcatggagcatatggacttgacagacatctctcacccagacgcccacgtgtgaacacacccacatccacatctctgggtggaaaccagcctagagaggggacgacgctaatggtgttgctttagaaccgtcttttcttacccttttagactcgtgttttgtgtgagacaccattgcaagaaaattttatccctccagaagtattttattactaaagaacaaaagcaaaaaaagcttaaattgcactggttaaagtacagtttccaacagctgtccttcctcagtactctaatggccactccaccgcgagtggaagtcactgttgtgtgtacacaggtggtcccaatcaaaacttcatcttgtgagcccaattatgtccattttgttatagactaaatcaggggtttgttctacaagaacaatacatgttttaccctttcctttaactagaaggataactagtaatgcatcaacataatttctgtattaaccatcatgcgcacaagaaatacataggaaataaggaagaagaaaactcctggcatcggatcttaagctagatgattagaatgtgaaaaagattttacaaatgtaaaacttctatttctctgtagaaactttcttcactttgctgtgcaagaagacactgctttgctatattcaaaatggcttttcttacaagagatttatgtatttggtaaatgtttgtagtcaacagttcacacaagaagctgtacacggtttgatcatgtaaaaccgtttggcggcacaagctggactttgttgccatccttgagatgaaccttttaagaaaaataagttaatctcaatttttccctgaatgtgttgtttttcttcattatacaataaatataatagtgaactttttatcaaatggtgaagacaatgctaaaggttgttgcaaactgtttgtctcccgcactcactccagtaaagacggactggctcttcctgtgcgtcgagactctgtcacgtttgcctggggacacaaggcgctggctttgccaccaggcagccccttcccctaaagccctctcctttttcattcctttcacgaagaccttcttcacccgcaggcttctttctctgggttgagacagggccaaggaaaccgtcccaacgccccactgggc

SEQ ID NO: 4966 - DNA, 481 bp, Homo sapiens
actttgtaggacaaaacatagctggttaaccttgaagtgactgttgtaccatggttgtgcacatgcttcagaatcctatggaagagaatattcctacttgcagtacatcaaaggaatggatggtggaccctactattcatgttttgagacataaatgttcactttaaagcaattgcataatagataaaaacctgaactttcattggatttttgttaattttcctcattttgaattatgtgcactaccatagctacatcagtttgatacagtattgaaaaattatcagttatattttgctgtttatgatctatttgtagattaggattaaaatggatttaatccatttttaaggctgtgtgaatttttctaaacaagaaccatttgcaatatggatttcttagagattaaaccaattataacttattagcagtcgcgagcacatgttcatatagtcaatgtaaaaatacactaatgagtatt

SEQ ID NO: 4967 - DNA, 678 bp, Homo sapiens
  misc_feature (1)..(678): n=a,t,g or c
cacaaaaaaaaaatcactaaaaattcccacaaatcttgtttctggcactttagaaaaactgcaaaaaaatacgtaataaagaatacatatatatatatctacacacaaattatatatctatctatctatacagcggaaccacaagagagactgaggaaggcctggaggcaggggcagaggtgacgacagtgcccctatatccttaacccatactcctctgaggcaaacaggcatgggaaaatggaagggttgaggatggaccggagaattggaacttcagaataggtcaaaattccaaaaccatggacatttttttttgggagaattgagattgtagacattttttttttcttaaatatgatcaaggaaaatagcttccagaatgtggtggttctgggcaacaaatgagattgtggcgacgtggagattaaaatatatgtatttgagctggggaatttgaatattgtgagtttcagatgttggaaatttgggattttgcagttttgtcttttgaaaatgatcaagtcttgtcagttcgtgccctctttccccatgttccctgggaagacgggtggtggcagagtgagaaggccactggtctgtgccgcacacgcaaaatttagaatctccagctagctctatcgtgtgaggnccagattagggaantgccatattacc

SEQ ID NO: 4968 - DNA, 379 bp, Homo sapiens; identical to SEQ ID NO: 3388

SEQ ID NO: 4969 - DNA, 276 bp, Homo sapiens
ttttttttgaaggcttttcttttattacatctaaagagctctacataaacaggtaacattcaataggtaaacaatttttttccaatgcatgtaataaatattttcacttggtacttttatacaaactgacattgtctactatacatttttaaaagccattttactggtttggcatgcggtatggaaattctaagagagaaagttttaaggcaatgaatcacagatttaagttcatggaatttatggtaactttatctgtttatgtacattttcccc

SEQ ID NO: 4970 - DNA, 324 bp, Homo sapiens
tcagagtattgcaacactttattaagagtattggctttgaatcagtagctgaagtaacaattgcatgaagccagattaggtgcactgcataatacccatactcgatttattgacattacttagcaatttactggacaaaagtcaaacttttttgttttttattaagcacattccacagtacaaagctgtcatgaataatatctgtacaatttaacagtttcaaatagctgttcagacacaaatttatttcaaacagataattggcaaacataattaatttacaagttagaattagactatcccagtgctttaaaacattaatat

SEQ ID NO: 4971 - DNA, 308 bp, Homo sapiens
tcccaattaggacttaaggaatgtgctgggacaaagttggcttcagtgatcaggttgtttcaagtcttagaattcaaacttcaattctaaaaaaattttatcaacaaaacactgtgaccaaaaaatcactttaaatcttaaatattgaaacgcaatagcatataaagatggtataacctaagatgcttttatttcattatattttcaatatctttacgcattataacaacagaaatgtaacctactcacattgccatttgttccattatgcaatttgaagaaacatgttttccttttatttttatgaa

SEQ ID NO: 4972 - DNA, 491 bp, Homo sapiens; identical to SEQ ID NO: 596
  misc_feature (1)..(491): n=a,t,g or c

SEQ ID NO: 4973 - DNA, 328 bp, Homo sapiens
tttttttttttgtttgtaaaaatgaatttattaaaatgctcataattataaaagaatattaaaatgcacagaaattaacattaataattataaaagaatattaaaatgcacagaaattaacattaattacaaactttacatcttatgccacaatgtgtgaaaagcatcatgaatagttctacttcagttaagctgctcatacatttttaccctctcaaacataatatgaacataaaatggtacaagaagtgtttcaacaagagtacattctgacccccattgtgaattaatgttttatgaaattcaaggcacacatgcaataaaaaag

SEQ ID NO: 4974 - DNA, 1769 bp, Homo sapiens
cctcactgactataaaagaatagagaaggaagggcttcagtgaccggctgcctggctgacttacagcagtcagactctgacaggatcatggctatgatggaggtccaggggggacccagcctgggacagacctgcgtgctgatcgtgatcttcacagtgctcctgcagtctctctgtgtggctgtaacttacgtgtactttaccaacgagctgaagcagatgcaggacaagtactccaaaagtggcattgcttgtttcttaaaagaagatgacagttattgggaccccaatgacgaagagagtatgaacagcccctgctggcaagtcaagtggcaactccgtcagctcgttagaaagatgattttgagaacctctgaggaaaccatttctacagttcaagaaaagcaacaaaatatttctcccctagtgagagaaagaggtcctcagagagtagcagctcacataactgggaccagaggaagaagcaacacattgtcttctccaaactccaagaatgaaaaggctctgggccgcaaaataaactcctgggaatcatcaaggagtgggcattcattcctgagcaacttgcacttgaggaatggtgaactggtcatccatgaaaaagggttttactacatctattcccaaacatactttcgatttcaggaggaaataaaagaaaacacaaagaacgacaaacaaatggtccaatatatttacaaatacacaagttatcctgaccctatattgttgatgaaaagtgctagaaatagttgttggtctaaagatgcagaatatggactctattccatctatcaagggggaatatttgagcttaaggaaaatgacagaatttttgtttctgtaacaaatgagcacttgatagacatggaccatgaagccagttttttcggggcctttttagttggctaactgacctggaaagaaaaagcaataacctcaaagtgactattcagttttcaggatgatacactatgaagatgtttcaaaaaatctgaccaaaacaaacaaacagaaaacagaaaacaaaaaaacctctatgcaatctgagtagagcagccacaaccaaaaaattctacaacacacactgttctgaaagtgactcacttatcccaagaaaatgaaattgctgaaagatctttcaggactctacctcatatcagtttgctagcagaaatctagaagactgtcagcttccaaacattaatgcaatggttaacatcttctgtctttataatctactccttgtaaagactgtagaagaaagcgcaacaatccatctctcaagtagtgtatcacagtagtagcctccaggtttccttaagggacaacatccttaagtcaaaagagagaagaggcaccactaaaagatcgcagtttgcctggtgcagtggctcacacctgtaatcccaacattttgggaacccaaggtgggtagatcacgagatcaagagatcaagaccatagtgaccaacatagtgaaaccccatctctactgaaagtgcaaaaattagctgggtgtgttggcacatgcctgtagtcccagctacttgagaggctgaggcaggagaatcgtttgaacccgggaggcagaggttgcagtgtggtgagatcatgccactacactccagcctggcgacagagcgagacttggtttcaaaaaaaaaaaaaaaaaaaaacttcagtaagtacgtgttatttttttcaataaaattctattacagtatgtcaaaaaaaaaaaaaaaaaa

SEQ ID NO: 4975 - DNA, 9517 bp, Homo sapiens; identical to SEQ ID NO: 92

SEQ ID NO: 4976 - DNA, 4587 bp, Homo sapiens
gcaggcaggcggcgggcgctcagacggcttctcctcctcctcttgctcctccagctcctgctccttcgccgggaggccgcccgccgagtcctgcgccagcgccgaggcagcctcgctgcgccccatcccgtcccgccgggcactcggagggcagcgcgccggaggccaaggttgccccgcacggcccggcgggcgagcgagctcgggctgcagcagccccgccggcggcgcgcacggcaactttggagaggcgagcagcagccccggcagcggcggcagcagcggcaatgaccccttggctcgggctcatcgtgctcctgggcagctggagcctgggggactggggcgccgaggcgtgcacatgctcgcccagccacccccaggacgccttctgcaactccgacatcgtgatccgggccaaggtggtggggaagaagctggtaaaggaggggcccttcggcacgctggtctacaccatcaagcagatgaagatgtaccgaggcttcaccaagatgccccatgtgcagtacatccacacggaagcttccgagagtctctgtggccttaagctggaggtcaacaagtaccagtacctgctgacaggtcgcgtctatgatggcaagatgtacacggggctgtgcaacttcgtggagaggtgggaccagctcaccctctcccagcgcaaggggctgaactatcggtatcacctgggttgtaactgcaagatcaagtcctgctactacctgccttgctttgtgacttccaagaacgagtgtctctggaccgacatgctctccaatttcggttaccctggctaccagtccaaacactacgcctgcatccggcagaagggcggctactgcagctggtaccgaggatgggcccccccggataaaagcatcatcaatgccacagacccctgagcgccagaccctgccccacctcacttccctcccttcccgctgagcttcccttggacactaactcttcccagatgatgacaatgaaattagtgcctgttttcttgcaaatttagcacttggaacatttaaagaaaggtctatgctgtcatatggggtttattgggaactatcctcctggccccaccctgccccttctttttggttttgacatcattcatttccacctgggaatttctggtgccatgccagaaagaatgaggaacctgtattcctcttcttcgtgataatataatctctatttttttaggaaaacaaaaatgaaaaactactccatttgaggattgtaattcccacccctcttgcttcttccccacctcaccatctcccagaccctcttccctttgcccttctcctccaatacataaaggacacagacaaggaacttgctgaaaggccaaccatttcaggatcagtcaaaggcagcaagcagatagactcaaggtgtgtgaaagatgttatacaccaggagctgccactgcatgtcccaaccagactgtgtctgtctgtgtctgcatgtaagagtgagggagggaaggaaggaactacaagagagtcggagatgatgcagcacacacacaattccccagcccagtgatgcttgtgttgaccagatgttcctgagtctggagcaagcacccaggccagaataacagagctttcttagttggtgaagacttaaacatctgcctgaggtcaggaggcaatttgcctgccttgtacaaaagctcaggtgaaagactgagatgaatgtctttcctctccctgcctcccaccagacttcctcctggaaaacgctttggtagatttggccaggagctttcttttatgtaaattggataaatacacacaccatacactatccacagatatagccaagtagatttgggtagaggatactatttccagaatagtgtttagctcacctagggggatatgtttgtatacacatttgcatatacccacatggggacataagctaatttttttacaggacacagaattctgttcaatgctgttaaatatgccaatagtttaatctcttctattttgttgtcgttgcttgtttgaagaaaatcatgacattccaagttgacattttttttttcattttaattaaaatttgaaattctgaacaccgtcagcaccctctcttccctatcatgggtcatctgacccctgtccgtctccttgtccctgcttcatgtttgggggcctttctttaactgccttcctggcttagctcagatggcagatgagagtgtagtcaagggcctgggcacaggagggagagctgcagagtgtcctgcctgccttggctggagggacacctctcctgggtgtggagacagcttggttccctttccctagctccctggtgggtgaatgccacctcctgagatcctcacctcttggaattaaaattgttggtcactggggaaagcctgagtttgcaaccagttgtagggtttctgttgtgttttttttttttttgaaataaaactataatataaattctcctattaaataaaattattttaagttttagtgtcaaaagtgagatgctgagagtaggtgataatgtatattttacagagtgggggttggcaggatggtgacattgaacatgattgctctctgtctcttttttcagcttatgggtatttatcttctattagtatttgtatcttcagttcattccactttaggaaacagagctgccaattgaaacagaagaagaaaaaaaaaaaagcagcagacaacacactgtagagtcttgcacacacacaagtgcccaggcaaggtgcttggcagaaccgcagagtgggaagagagtaccggcatcgggtttccttgggatcaatttcattaccgtgtacctttcccattgtggtcacgccatttggcagggggagaatgggaggcttggccttctttgtgaggcagtgtgagcagaagaagctgatgccagcatgtcactggttttgaagggatgagcccagacttgatgttttgggattgtccttattttaacctcaaggtctcgcatggtggggcccctgaccaacctacacaagttccctcccacaagtggacatcagtgtcttctctgtgaggcatctggccattcgcactccctggtgtggtcagcctctctcacacaaggaggaacttgggtgaaggctgagtgtgaggcacctgaagtttccctgcggagtcgataaattagcagaaccacatccccatctgttaggccttggtgaggaggccctgggcaaagaagggtctttcgcaaagcgatgtcagagggcggttttgagctttctataagctatagctttgtttatttcacccgttcacttactgtataatttaaaatcatttatgtagctgagacacttctgtatttcaatcatatcatgaacattttattttgctaaatcttgtgtcatgtgtaggctgtaatatgtgtacattgtgtttaagagaaaaatgaaacccacatgccgccattttcctgaatcaaattctgcagtggaatggagaggaaaatacttctaggcaagcagctagactggtgaattgggggaaatagaaggaactagtaactgagactcctccagcctcttccctattggaatcccaatggctcctggagtaggaaaaaagtttaaactacattcatgttcttgttctgtgtcactcggccctgggtagtctaccatttacttcaccccaagtcctgctgcccatccagttgggaagcccatgattttcctaagaatccagggccataggagatacaattccaagttctcgcttcctcctttgggcatctcttctgcctcccaatcaaggaagctccacgctcaggctctcagctctcgggccagtgctctgctctgtccagggtaggtaatactgggagactcctgtcttttaccctcccctcgttccagacctgcctcatggtggcaacatggttcttgaacaattaaagaaacaaatgactttttggaatagccctgtctagggcaaactgtggcccccaggagacactacccttccatgccccagacctctgtcttgcatgtgacaattgacaatctggactaccccaagatggcacccaagtgtttggcttctggctacctaaggttaacatgtcactagagtatttttatgagagacaaacattataaaaatctgatggcaaaagcaaaacaaaatggaaagtaggggaggtggatgtgacaacaacttccaaattggctctttggaggcgagaggaaggggagaacttggagaatagtttttgctttgggggtagaggcttcttagattctcccagcatccgcctttccctttagccagtctgctgtcctgaaacccagaagtgatggagagaaaccaacaagagatctcgaaccctgtctagaaggaatgtatttgttgctaaatttcgtagcactgtttacagttttcctccatgttatttatgaattttatattccgtgaatgtatattgtcttgtaatgttgcataatgttcactttttatagtgtgtcctttattctaaacagtaaagtggttttatttctatcac

SEQ ID NO: 4977 - DNA, 309 bp, Homo sapiens; identical to SEQ ID NO: 602

SEQ ID NO: 4978 - DNA, 430 bp, Homo sapiens
tttttttttttttttgaagtctctcaacatttcatttttaatttttctaatagtacattctttaaaagaagttaacgacttcaattccaaatataaggattaaataatgcaatgaaaagctgtcattttcagtgaagctattgcctaattaccctggaaaaaagtattcttatgactgaactgatgcaaaaatcccttagaaaagcttcatttgttgcctgtaaagagtcttcttaaggtcacttttacttctagactgcccccttgtttccagtgaaagagttttgcttggtaatggcttgtggttccacagtgttttgtgtatgaaaagcgtagactaagagatactactgaagtcgctcaaattgtagattctgccatgaaaggaagtcccaacactgtaacatttccccttaatcttcagcaagac

SEQ ID NO: 4979 - DNA, 371 bp, Homo sapiens
acaatgcatggattacttttattcatatgaaagtaatataaaatgttacctaacttaaataatataaaatatcggtttaaccaaattaacaatcacaaaactgcagacatttttctattaaagttttccagttcactgagcaatatttactgaaaaatatgattatgaacttaaatatgtcctctttaaaatttgctgtttatgctagactgtacaatggtgctccctttatgatttttaaaaattttacttacataactatgtaattccaaaatagaaaagtgagtgagccatcactaaaatttactggaaactaatattctttcatggaaacaactgataaacattttaaagttctatatttatttaaa

SEQ ID NO: 4980 - DNA, 82 bp, Homo sapiens
tatttttgacctgtacaataggcactttattagtggttggaatgcagttacacgcaggggtgtgcagacgcaatgggggcag

SEQ ID NO: 4981 - DNA, 281 bp, Homo sapiens; identical to SEQ ID NO: 767
  misc_feature (1)..(281): n=a,t,g or c

SEQ ID NO: 4982 - DNA, 2638 bp, Homo sapiens; identical to SEQ ID NO: 1040

SEQ ID NO: 4983 - DNA, 345 bp, Homo sapiens
tttttaaaaattaagactggggtgatttattaatcttgttaagaactctgatacaaagcacagtaaaaggccacaaaccagtaaataaacaacgtggcttttggctactttacaactgctgctacagcactatcagcaaaacactctatcactttgaacgaaggcatccaaatggcaaataaaagctttactcacttatctgattaaaatgtttaataaagctttaagtatttgctggtttaaatattaccaatctaaaaaatatatttaaaaaaaatttcagttaacacgagatttatagagaaagttactaggtcttgaaggcaaggcagttggttcctatgc

SEQ ID NO: 4984 - DNA, 214 bp, Homo sapiens
  misc_feature (1)..(214): n=a,t,g or c
gttcagtgatagtttattggtccttagcatgacatctcgattaccaaggtaaattcacatacacaactgcaggtaaaaacatgtaaaataatataaaantaaattgaaggctacttttatatatttnctgaattaagtagtgtaataaatactatgataagcaaaaagcttcaatcgcacaattcagtttcactgaagttacagtagtgtttgt

SEQ ID NO: 4985 - DNA, 386 bp, Homo sapiens
ttttttttgcaacatttaatacagtttttatttgtttaatttggtaaatgtagaatgtaatggtttcaaggcaaaccctggactacttcagtcacaacccaatagttaacatgattctgaagaacagtcttatctgcaatatctacccacttctaaacaaacacatctatagaaatccatgtacatatatattagttttcaacaagtcaggattttcaacaactctaaaatttcaattttatattctggaacacacttcaaaattatccacttgatgtcagggatataaccataggggaggataaaatttcatgccaatgatactcagggtttttttttttaaagggtaaatcccaatattttgatccattccatggctaccataa

SEQ ID NO: 4986 - DNA, 323 bp, Homo sapiens
  misc_feature (1)..(323): n=a,t,g or c
aaacagtaggctttgaaggacagcaggaaaaaaaaaaactgaaaactttgtattcacatttggctgcccattaattaaaacttcaatggacttaagcaatttgaattataaactctcatttaataaaacacccacacaatgacaagaatgagactttaatcagttttaagtggagtttataacactaagngataaagggttgttaacaaacacaataacaaatggncatctgattgggatgaggcattatcctgtacacatcatattggtatttttgtgtatcctcagtgcatagcatttacacacagagccactgctgcaca

SEQ ID NO: 4987 - DNA, 390 bp, Homo sapiens
  misc_feature (1)..(390): n=a,t,g or c
ttttttgtgcaaatattttttacttnatttgtctcctttcaggagcctcacagacatatccagggaaaaagatcgttaaataaatgccttcagccatcgcaatgcaaaaataaatatcaatcctccagacgcagtagcagccncgntggcnccaaagtcccaacggccacggctaacaattataaaagtgttcagcgagagtgttggcgtgagtgtgaatgggtgtgcgctggggggcacggtggagcggtgtgcaaaatcggagttgcaaaccatcggacaagggcatggagtggctacccgccgccgactcagcgcgggcnccttccccgcacacantcacagcagagttcgcactggggagngttaaaaaataaacatttacaggtc

SEQ ID NO: 4988 - DNA, 324 bp, Homo sapiens
tttaatgagactaacattattttaaagtgtttatttttttctataatacatttcattcaaatcataaaagtctgatacatttttttctcaagaacaacttacactcatttgagatgctttttctttcctttaatcttataggatggacaaagatacactttaatggacaaaaaacaccagagttcattacaaatacagcttcccaggccccacctccagcacttctgactgagcgtctgggaccagtcctaggatcgcaaaactgtaaaattcccccagtcaactccacggcaggcaggcctggaaccacccttagtggaacac

SEQ ID NO: 4989 - DNA, 311 bp, Homo sapiens
tttttttatcttttaaaaatacactttaatctaaccatggaatttcacaaacatttatatacaatcagagactaatttgaagtatgttttccattcatttcagccatgagaaaacacattgcagtaaaaattaaagatatccatccataaattacttttatttctcattaaatgagcacagagtcattagtatattaataacagatatgtttattattacatatccatcagtgcggctttcaataccacttgaaacatgcatatcatcctagagacgatcggttttccagtgcttcttatctgatacacat

SEQ ID NO: 4990 - DNA, 365 bp, Homo sapiens
gtattcagttatacattttattctctaataggtacaatactaaaataaacacaaattaaaaaaaagttttattaaaacaaaactgtacaaaaaagcagtatactacattttaattacagaacagtctactgtccaaaaggcactaatccagaataggagatacaatgatacaggactcatttgaactattttattcaaaacaatagagcgcttgtttctttgaccatttacatctagaaacaagggctttttgctacagccattacacattgttataaatatgagtcctacgggtgaaggtgcagtatcactctccctagaggaggttccattagtgggaccactgtggagctcagaggcggatg

SEQ ID NO: 4991 - DNA, 379 bp, Homo sapiens
ttttttaggaataacaaatgtttattcagaaatggataagtaatacataatcacccttcatctcttaatgccccttcctctccttctgcacaggagacacagatgggtaacatagaggcatgggaagtggaggaggacacaggactagcccaccaccttctcctcccggtctcccaagatgactgcttatagagtggaggaggcaaacaggtcccctcaatgtaccagatggtcacctatagcaccagctccagatggccacgtggctgcagctggactcaatgaaactctgtgacaaccagaagatacctgctttgggatgagagggaggataaagccatgcagggaggatatttaccatccctaccctaagcacagt

SEQ ID NO: 4992 - DNA, 285 bp, Homo sapiens; identical to SEQ ID NO: 2910
  misc_feature (1)..(285): n=a,t,g or c

SEQ ID NO: 4993 - DNA, 325 bp, Homo sapiens; identical to SEQ ID NO: 2568

SEQ ID NO: 4994 - DNA, 204 bp, Homo sapiens
agtttaatagacmtttattycttcagttgaacaacctctacacamttaaamtgtatgccytaagctctkktccttttttgtgaagaamtttaggtctcaagaacttttatgaacttgctatgagtacttyctgggaatyaattaactgrgccttttgaaacccctagagaagataggagaaacttggttcagaacgagcattaa

SEQ ID NO: 4995 - DNA, 399 bp, Homo sapiens
aaataaaaagtaatcatttttatttgcattggcatttttgtcaattcagactgagaaatgatgagccttttttgttgttgtttttagtagcttacatggtgcttttagttctataaaactcccatctttgttgaatgacgagattgtaaaccagaaaccaaaaaccaaaaaacacccacacagctgtcttatacttctgtaaccatttctgaacttaaaactctcttgttcgttacacctcattcattgcatcttagttttagcttgtcaaagatcttttagtagctctaacatagcccactagctaagtcttgtaaatgtgtataagctggacatttggtaatattatttttaaaaaaggaaaaggaggaataggtatacttatttaatacttattgt

SEQ ID NO: 4996 - DNA, 393 bp, Homo sapiens
  misc_feature (1)..(393): n=a,t,g or c
caaaaagcatttttgtttaatgctaagatcacttcagtttccaaggtcatataaagaaacatccaatttagagaaaaaattctgtaataagttcaaataccaaagcgtaaagatgatgtaacacagtgcctatgctgcatggttacacaaatgaaacgagaaaggtagtgattgcttctaaattctcactgaaaatccaatttaaaggtttattgcagtctaggtatttttaattttncccttggtgattatcaagatggttgatgctaataagtactattaaaaaactaaaatgctgtcgaatatggaacttcttttagttaagaattattaatatagaaaatgtgagttggtggactggtacttcttgtgcnctgatttttatttattnat

SEQ ID NO: 4997 - DNA, 5900 bp, Homo sapiens
gggatggcaagatcttttagcatttaggggatgcctttgttagtaaccgttcacaatgggcagctcccggctgagggtctttgaccctcatttggagaggaaagattccgccgcggcgctctcagaccgagagctgcccttgcctaccttcgatgtgccttatttcaaatacatcgacgaggaggatgaggacgatgaatggagcagccgttcgcagtcttccaccgaggatgactcagtggactctctgctctctgacagatatgtggtggtgtccgggaccccggagaagattttggagcaccttttgaatgacttgcacctggaagaagtccaggacaaagaaacagagaccctcctggatgacttccttctcacgtacactgtcttcatgacaactgatgacttgtgccaggctctgttaaggcactattctgctaagaagtatcaaggcaaagaggaaaactcagatgttccgcgtaggaaacgtaaagtcttgcatcttgtttcccagtggattgctctgtacaaagactggttacctgaagatgaacattcaaaaatgtttttaaagaccatatataggaatgtactggatgatgtttatgaatatccaatacttgaaaaagaattgaaagaatttcaaaagatacttggaatgcaccgtcgtcacactgtagatgaatattcaccacaaaaaaagaataaagcccttttccaccaattcagtcttaaggagaactggctccagcatagaggaactgtgactgaaacggaggaaattttctgccacgtgtatataacagagcactcctatgtcagtgtgaaggcaaaagtttccagtatagcccaagagatcctaaaagtcgtggcagaaaagatccagtatgcagaagaggatctggctctggtggccatcacattctctggggaaaagcatgaacttcagccaaatgacttagtcatctccaaatccctcgaggcatctggtcgaatatatgtctaccggaaagacctggcggacactttgaacccatttgcagaaaatgaggaatcacagcaaaggtcgatgaggattttgggaatgaacacttgggatcttgctctggaattaatgaattttgattggagtctattcaattcaattcacgagcaagagctgatctacttcacgttcagcagacagggaagtggggaacacactgcaaatctcagccttctgctccagagatgcaatgaggtccagctttgggtggccacggagattctgctctgcagccagctgggcaagcgagtgcagctggtgaaaaaattcatcaaaattgcggctcactgcaaagcccagagaaacctgaattctttctttgccattgtgatgggtctcaacactgcttctgtcagtcgactgtcgcagacctgggagaaaatccctgggaagtttaagaaacttttctctgaacttgaaagtttaacagatccttccctaaatcacaaagcctacagagatgcattcaaaaagatgaagccaccaaaaatccctttcatgcccttattgcttaaagatgtaacatttattcatgaaggaaataaaacttttttggataatcttgtcaattttgaaaagctgcatatgatcgcagacactgtccgaaccctgagacactgcaggactaaccagtttggtgacctgtctccaaaagagcatcaagagttaaagtcctatgttaatcacctgtatgtcattgacagccagcaggctctgtttgagctctcacacaggatcgagcctcgggtgtgagccccactgcctcacctcccctgtatctgcagcactttgagctacgggaatgtctatgccaagcacgttgctttcctgtgagaaaagaagttgctgagttttatcagtataacccaagacattcacaggaaagccagccaaagcgtgttcaggaagtgatgtcagccaccagagagggggagaggtttctccatgctactctcgggacaagaaggcagaaggagagtcagaagcattcttgagatggagaaggctggtttcttatgatcacattgttgatccagtccagttttcaatatgagatgtgccagcatcaagacaagacaacgtcttgacatgcaatgaccaaatatttcattaagagcgtgcatgaaacaggaaggagtttttactttgcctagttttagattactgtccataagctgtcaaagaagtcattcttttgaacacctgatgacagagacagcatctctagatctccagggaggagaggtttctgttgatacaacctgtgacatcaccaaaagccacttgtgtctagggagttagtgaggactgcagctagcatccatgctctgatgggcagatgaacaatgtcaaggtgtgcatcactttgcaccacaatcaactattgacacatgcttgcaggtgaaattagtttctgtacaactgatttgcagctataggcaaggtagatgaagttgctttgccagtaaggaaaaatagtaatctttaagaaattgactcattgtttaatttctggggattttctttatacttctaagcaggctcttatcttttattggacataatatgattttgaaaaagcacagtgcctgacacattgcaaacactcaccaactgcttgctgaggtgacagagtcacaaaagtctgcattcttgtgcctgatgatgcattttgcgtacctcatacaggctccttgcccacactatggaatgacagcagccagtgcagggaggttaagtgacatttaatgagtgaagcacttagcactctctaggtaataagatagtggtaattactagtgttttggcaaatgaaaaatgccctgaaatagccaaatgtctgattaatgttggcaacttagaagtcctataatccaactaccagccaaagcagggagcctttctataatttgcctttttttttttttttttcaaaatctgagtcttctaaaatcttattattcccatttttaccaattgaggctcctgtagcaaataagacctcttgatattttcaaggactggttagaggatttctttcaaccttcacatgaacaaaacagcctatgggtcaaaataatgaaatccacccctgcctgctagatacttgtcaccttgctaaaatgcaagggcctggtccattcattttccaaatgcaggagtcttggtgcacttctcactcttcctgcctgttcatctctttcatgcccacacagacctgtttcctttttgtctcatcaacgcctcattcatcctcattactgaggcgtgtccaatgctttttgacatctttatagcagtgctgtttcctgggctcaggaaccacactgagcttgagatactgctggaaggaaccatgtggagagaaggtttgggagaactttgagagagacttagtttggcccagcatgtaaaacttcagtcctgaacatttatagggttttatagaagggcatcctccagggctggtccattcagagaaatgctgcatgctgccgtcatggaatgtggcccacaggacaccagagccgtgagaaccggagagcagacttccctcacggctgggctgagcaaaccctccaaagccctcctcacgcagttactaacaatagcatgggcttacagcacaagcacgtgttctcacctttttcctatgccctggactaaggtttggccagtgtaatcatataaggccatcctgacattgtttctgtgtttcaaaatttggatttttatttacattagaactacattgctcctagtagaacattacctttaggggactaattttccatggagaactatttcagcatattgcatgctgctcagaccccaagtcagatatgcccaccaagccagatgaagctacacaaatgtggtatttaaatgcattttgtacagtgacttcagagtatctcacatgacatgggtgtaaactggctggggagaaaatgatgcttgttcacctcttcctccagccgtggttaggtggtcctaggggtagcagagggaagggaggattttgtgcagtcaagatttgcttttccatccttgtcttctgaatgtctaaaatctctgcatctttctgaagtttaacaactgtctccagaggtttgccaggcagcagctctcagaagtttccaaagctttgcagaatcttagatctggaattaaagaattcaagcccgaattgtgagaaccagatattactcaacagaaagctctttctaaggaatctgagctgttcactggtggacagtggtggggcttgagtgctccttgttaataggatgggccatgcaccctctctggatattcaccaaggcctcttcagaatagggtttgttctggctagaagcgtggtctagaagatggctaagctctttgccagctctcatttggagttttattattgcataaaatcttcgctcactctgcaaatcttacgtaatctggcaccttcggcaccaggtggtgcaggggcacttctaagtgggctctttttgttacagcacaactctcagacagtcctgtgggtctttggattcgtcagcattccagcaaactagccctgcttagaagttagcacaagacggcagaatgcaggaccccgtaggcaaaatcacaaccttgctattaaaaaaaatttttttttacatacacatttgcaggtgttccctagagtgtggtgttttgaatttgctctttgtcatctgtataattgccaaatgattatagtgatacacatgacctgcattcacttttttctagtttccttaattatgtttagaataaattcgtttccctagaccgagaaccacaaacaggtagtgtggagcatacaccgaatttagaagcatgtggataaggtcagtgctcacactgcctagtccacagggagaggatgctgcatgaatatatacttgcctctgagtggaggagaaatcgtggcatgaaagagagagtaccagtgatgacttcttatccctggagctgggctttcactgctacccatatcccagccctgcgagtctgttctagccagcacagacaccgcagatccggaactgaatgttcctaaatggcgcagccaatccaggcttttcagaaactgggcaaaaacattaaaatggggacgatcgggtcttccgcagtggtccaacacaggatttcttttaaatgtttcaaaaacatgtccttaaaatttcagcctgcttcttagcgagtgggccagttttgcttaaaactggtgggggggcgggggggaagtttttaaaaattgccaaaaagttagatgcaaatgtattactgtataaagcaaagctgtatatactaaacattttttagcagagtaatatttatttgcatagtctatttattgtattcgtattacactgttattaaatactgggatgaaatcagtgacctgaagcaagaaatcttgccttttaatgtatcattaattagggctgctgtgatattgtcagcttgcattaacaattagaagatagagaacccgccatcagggtgtctacctaacttctcagggactacacttggtagttttccaccatttaaagaactggtaaatatgaaacatttgttgagttaccagaattgccattaacagtgttttctttcccatattccatgctttctgcctctgtgtatatatataatatatatgtatatgactgtgctgtgtatttatcgaagctagtaagcaataatttatatgtaaaaatggccaagcaatataaggttaaaacttatataagtaacccttaccttatcttgtattttcaatttttttttaaaactgcttttccaaatatgagactatgttaaagacact

SEQ ID NO: 4998 - DNA, 270 bp, Homo sapiens
gccatgtaagtcccatcaggacgtagtcatgcctcctgcatttcgctacccgagtttagtaacagtgcagattccacgttcttgttccgatactctgagaagtgcctgatgttgatgtacttacagacacaagaacaatctttgctataattgtataaagccataaatgtacataaattatgtttaaatggcttggtgtctttcttttctaattatgcagaataagctctttattaggaattttttgtgaagctattaaatacttgagtt

SEQ ID NO: 4999 - DNA, 1071 bp, Homo sapiens; identical to SEQ ID NO: 170

SEQ ID NO: 5000 - DNA, 381 bp, Homo sapiens
  misc_feature (1)..(381): n=a,t,g or c
gtagttttagtgaaaacaaatttaatatcatcttgtttgaacaaagctttcagaataagtgagcaattaaattcttaaagtagggacagaacaccaacaggctctagactccggaagagctgtaanccgacaaatgggcattgttttgcttaacagttttagcttcaatgtaaatatatattattacttagaatattagcatctgaactatataatgactattttatcattttacttgaattaaaaccagaatttctggaacttccaaatagtctttaaagtttttcaatataaacataaactaacccctattcctctctacatatcaaatgtgaaataactgtcacaatatatcagcattttcacagaaagatgtttaag

SEQ ID NO: 5001 - DNA, 230 bp, Homo sapiens
gcagttatttcaattcaggttttattaaagttgtttctgaatattttttctcagtgatccttgttctgatgaatattacatttcatccttagttttgctcatttgattttgctttagtgtttaaagaacttttatttatcagatcctttgccatgaatgagagcaccaaataacatatcaatacccaactgcctgattcctttacagcagtaagaaaagtcagtaaaaca

SEQ ID NO: 5002 - DNA, 415 bp, Homo sapiens
  misc_feature (1)..(415): n=a,t,g or c
agtatatttcatattattactaatagttggcctatatatctgtatgtctgcatatttttcctacacttgggattttagaaatgtatggcactgtttacacagtatatgcttaagttcttcccataactcaacgaccaatgataacctttttctgattggagtgttccatactttggaagacataatttgtataatcgcacggttactgacggaggagaatctatgtgattcagtccatgtgcacaatgaaaatcagcatatcaccctggggaacattttagttcccaagtctttgggnaatgacggatggtaaaaaacactagctgtcaattttttttcagtaattggttttcagtgctttttttttttcaatctgatgaggagggtgatgcattaggaaggngtgtcccttgcc

SEQ ID NO: 5003 - DNA, 7888 bp, Homo sapiens
tccgggtatggatgtcaatcttttgtctacaatgtgaatacatttatccttcggggaccatcaagactttcaggaaaggccccgcctgtctctgcgcggccactttgctgggacaaaggtcaactgaagaagtgggcaggcccgaggcaggagagatgctgaggagtccatgtgcaggggagggaaagggagaggcagtcagggagaggaggaggaggtaccgccagaaggggatcctcccgctccgaaaaccagacaccgggtcttgccctgtggtccaggcaggagtgcagtggtgcaacctcagctcactgcagccttgacctccccgggctcaagcgatcctccggccacagcacttggctgttcagcggctggaggagcagggccccaggtcctccccaccctcacctgctgctcccaggtcgtggccgtcttgctcttccaggtccttctctagggatgcaatattcacattgctaagatgcaggtctaacgcagaacctgtcaacagagccccccatcatccacagcccacccagcgctgcagagctcaggaagcctagctgaggaggacgaccgtcccacctgggcttagagtgagaccaagggcagaaggcgtgggagttgctggggcagccagggaaggacacccccagcccgtcctcgcagccccccacaggcagtgggaggcttggctgttcctccggcaaaacgggcatgctcagtgggccgggccggcaggtttgcgtggccgctgagttgccggcgccggctgagccagcggacgccgcgttccttggcggccgccggttcccgggaagttacgtggcgaagccggcttccgaggagacgccgggaggccacgggtgctgctgacgggcgggcgaccgggcgaggccgacgtggccgggctgcgaaagctgcgggaggccgagtgggtgaccgcgctcggagggaggtgccggtcgggcgcgccccgtggagaagacccgggcggggcgggcgcttcccggacttttgtccgagttgaattccctccccctgggccgggcccttccgtccgcccccgcccgtgccccgctcgctctcgggagatgtttatttgggctgtggcgtgaggagcgggcgggccagcgccgcggagtttcgggtccgaggagcctcgcgcggcgctggagagagacaagatgtccgccagagctgcggccgccaagagcacagcaatggaggaaacagctatatgggaacaacatacagtgacgcttcacagggctcctggatttggatttggaattgcaatatctggtggacgagataatcctcattttcagagtggggaaacgtcaatagtgatttcagatgtgctgaaaggaggaccagctgaaggacagctacaggaaaatgaccgagttgcaatggttaacggagtttcaatggataatgttgaacatgcttttgctgttcagcaactaaggaaaagtgggaaaaatgcaaaaattacaattagaaggaagaagaaagttcaaataccagtaagtcgtcctgatcctgaaccagtatctgataatgaagaagatagttatgatgaggaaatacatgatccaagaagtggccggagtggtgtggttaacagaaggagtgagaagatttggccgagggatagaagtgcaagtagagagaggagcttgtccccgcggtcagacaggcggtcagtggcttccagccagcctgctaaacctactaaagtcacactggtgaaatcccggaaaaatgaagaatatggtcttcgattggcaagccatatatttgttaaggaaatttcacaagatagtttggcagcaagagatggcaatattcaagaaggtgatgttgtattgaagataaatggtactgtgacagaaaatatgtcattgacagatgcaaagacattgatagaaaggtctaaaggcaaattaaaaatggtagttcaaagagatgaacgggctacgctattgaatgtccctgatctttctgacagcatccactctgctaatgcctctgagagagacgacatttcagaaattcagtcactggcatcagatcattctggtcgatcacacgataggcctccccgccgcagccggtcacgatctcctgaccagcggtcagagccttctgatcattccaggcactcgccgcagcagccaagcaatggcagtctccggagtagagatgaagagagaatttctaaacctggggctgtctcaactcctgtaaagcatgctgatgatcacacacctaaaacagtggaagaagttacagttgaaagaaatgagaaacaaacaccttctcttccagaaccaaagcctgtgtatgcccaagttggcaaccagatgtggatttacctgtcagtccatctgatggtgtcctacctaattcaactcatgaagatgggatttcttcggcccagcatgaaattggtaaaattcagaaaaggagatagtgtgggtttgcggctggctggtggaaatgatgttggaatatttgtagctggcgttctagaagatagccctgcagccaaggaaggcttagaggaaggtgatcaaattctcagggtaaacaacgtagattttacaaatatcataagagaagaagccgtccttttcctgcttgacctccctaaaggagaagaagtgaccatattggctcagaagaagaaggatgtttatcgtcgcattgtagaatcagatgtaggagattctttctatattagaacccattttgaatatgaaaaggaatctccctatggacttagttttaacaaaggagaggtgttccgtgctgtggataccttgtacaatggaaaactgggctcttggcttgctattcgaattggtaaaaatcataaggaggtagaacgaggcatcatccctaataagaacagagctgagcagctagccagtgtacagtatacacttccaaaaacagcaggcggagaccgtgctgacttctggagattcagaggtcttcgcagctccaagagaaatcttcgaaaaagcagagaggatttgtccgctcagcctgttcaaacaaagtttccagcttatgaaagagtggttcttcgagaagctggatttctgaggcctgtaaccatttttggaccaatagctgatgttgccagagaaaagctggcaagagaagaaccagatatttatcaaattgcaaagagtgaaccacgagacgctggaactgaccaacgtagctctggctatattcgcctgcatacaataaagcaaatcatagatcaagacaaacatgctttattagatgtaacaccaaatgcagttgatcgtcttaactatgcccagtggtatccaattgttgtatttcttaaccctgattctaagcaaggagtaaaaacaatgagaatgaggttatgtccagaatctcggaaaagtgccaggaagttatacgagcgatctcataaacttgctaaaaataatcaccatctttttacaactacaattaacttaaattcaatgaatgatggttggtatggtgcgctgaaagaagcagttcaacaacagcaaaaccagctggtatgggtttccgagggaaaggcggatggtgctacaagtgatgaccttgatttgcatgatgatcgtctgtcctacctgtcagctccaggtagtgaatactcaatgtatagcacggacagtagacacacttctgactatgaagacacagacacagaaggcggggcctacactgatcaagaactagatgaaactcttaatgatgaggttgggactccaccggagtctgccattacacggtcctctgagcctgtaagagaggactcctctggaatgcatcatgaaaaccaaacatatcctccttactcaccacaagcgcagccacaaccaattcatagaatagactcccctggatttaagccagcctctcaacagaaagcagaagcttcatctccagtcccttacctttcgcctgaaacaaacccagcatcatcaacctctgctgttaatcataatgtaaatttaactaatgtcagactggaggagcccaccccagctccttccacctcttactcaccacaagctgattctttaagaacaccaagtactgaggcagctcacataatgctaagagatcaagaaccatcattgtcgtcgcatgtagatccaacaaaggtgtatagaaaggatccatatcccgaggaaatgatgaggcagaaccatgttttgaaacagccagccgttagtcacccagggcacaggccagacaaagagcctaatctgacctatgaaccccaactcccatacgtagagaaacaagccagcagagacctcgagcagcccacatacagatacgagtcctcaagctatacggaccagttttctcgaaactatgaacatcgtctgcgatacgaagatcgcgtccccatgtatgaagaacagtggtcatattatgatgacaaacagccctacccatctcggccaccttttgataatcagcactctcaagaccttgactccagacagcatcccgaagagtcctcagaacgagggtactttccacgttttgaagagccagcccctctgtcttacgacagcagaccacgttacgaacaggcacctagagcatccgccctgcggcacgaagagcagccagctcctgggtatgacacacatggtagactcagaccggaagcccagccccacccttcagcagggcccaagcctgcagagtccaagcagtattttgagcaatattcacgcagttacgagcaagtaccaccccaaggatttacctctagagcaggtcattttgagcctctccatggtgctgcagctgtccctccgctgataccttcatctcagcataagccagaagctctgccttcaaacaccaaaccactgcctccacccccaactcaaaccgaagaagaggaagatccagcaatgaagccacagtctgtactcaccagagttaagatgtttgaaaacaaaagatctgcatccttagagaccaagaaggatgtaaatgacactggcagttttaagcctccagaagtagcatctaaaccttcaggtgctcccatcattggtcccaaacccacttctcagaatcaattcagtgaacatgacaaaactctgtacaggatcccagaacctcaaaaacctcaactgaagccacctgaagatattgttcggtccaatcattatgaccctgaagaagatgaagaatattatcgaaaacagctgtcatactttgaccgaagaagttttgagaataagcctcctgcacacattgctgccagccatctctccgagcctgcaaagccagctcattctcagaatcaatcaaatttttctagttattcttcaaagggaaagcctcctgaagctgatggtgtggatagatcatttggcgagaaacgctatgaacccatccaggccactccccctcctcctccattgccctcgcagtatgcccagccatctcagcctgtcaccagcgcgtctctccacatacattctaagggagcacatggtgaaggtaattcagtgtcattggattttcagaattccttagtgtccaaaccagacccacctccatctcagaataagccagcaactttcagaccaccaaaccgagaagatactgctcaggcagctttctatccccagaaaagttttccagataaagccccagttaatggaactgaacagactcagaaaacagtcactccagcatacaatcgattcacaccaaaaccatatacaagttctgcccgaccatttgaacgcaagtttgaaagtcctaaattcaatcacaatcttctgccaagtgaaactgcacataaacctgacttgtcttcaaaaactcccacttctccaaaaactcttgtgaaatcgcacagtttggcacagcctcctgagtttgacagtggagttgaaactttctctatccatgcagagaagcctaaatatcaaataaataatatcagcacagtgcctaaagctattcctgtgagtccttcagctgtggaagaggatgaagatgaagatggtcatactgtggtggccacagcccgaggcatatttaacagcaatgggggcgtgctgagttccatagaaactggtgttagtataattatccctcaaggagccattcccgaaggagttgagcaggaaatctatttcaaggtctgccgggacaacagcatccttccacctttagataaagagaaaggtgaaacactgctgagtcctttggtgatgtgtggtccccatggcctcaagttcctgaagcctgtggagctgcgcttaccacactgtgatcctaaaacctggcaaaacaagtgtcttcccggagatccaaattatctcgttggagcaaactgtgtttctgtccttattgaccacttttaactcttgaaatataggaacttaaataatgtgaaactggattaaacttaatctaaatggaaccactctatcaagtattataccttttttagagttgatactacagtttgttagtatgaggcatttgtttgaactgataaagatgagtgagcatgcccctgaaccatggtcggaaaacatgctacacactgcatgtttgtgattgacgggactgttggtattggctagaggttcaaagatattttgctttgtgatttttgtaatttttttatcgtcactgcttaacttcacatattgatttccgttaaaataccagccagtaaatgggggtgcatttgaggtctgttctttccaaagtacactgtttcaaactttactatggccctggcctagcatacgtacacattttattttattatgcatgaagtaatatgcacacattttttaaatgcacctggaatatataaccagtgttgtggatttaacagaaatgtacagcaaggagatttacaactgggggagggtgaagtgaagacaatgacttactgtacatgaaaacacatttttcttagggaaggatacaaaagcatgtgagactggttccatggcctcttcagatctctaacttcaccatattaccacagacatactaaccagcagaaatgccttaccctcatgttcttaattcttagctcattctccttgtgttactaagtttttatggcttttgtgcattatctagatactgtatcatgacaaagactgagtacgttgtgcatttggtggtttcagaaatgtgttatcacccagaagaaaatagtggtgtgatttggggatatttttttcttttcttttcttttcttttttttttttttttgacaaggggcagtggtggttttctgttctttctggctatgcatttgaaaattttgatgttttaaggatgcttgtacataatgcgtgcataccacttttgttcttggtttgtaaattaacttttataaactttaccttttttatacataaacaagaccacgtttctaaaggctacctttgtattctctcctgtacctcttgagccttgaactttgacctctgcagcaataaagcagcgtttctatgacacatgcaaggtcattttttttaagaaaaaggatgcacagagttgttacatttttaagtgctgcatttaaaagatacagttactcagaattctctagtttgattaaattcttgcaaagtatccctactgtaatttgtgatacaatgctgtgccctaaagtgtatttttttactaatagacaatttattatgacacatcagcacgatttctgtttaaataatacaccactacattctgttaatcattaggtgtgactgaatttcttttgccgttattaaaaatctcaaatttctaaatctccaaaataaaactttttaaaataaaaaaaaat

SEQ ID NO: 5004 - DNA, 2216 bp, Homo sapiens
atttgatcctattaagaattgtccaaatgttggagcatttgattgaaaaatccttcttagccattttaaagatagctttccaatgattagacgaattgattctttctgtgactcatcagttcctttcctgtaaaattcatgtcttgctgttgatttgtgaataagaaccagagcttgtagaaaccactttaatcatatccaggagtttgcaagaaacaggtgcttaacactaattcacctcctgaacaagaaaaatgggctgtgaccggaactgtgggctcatcgctggggctgtcattggtgctgtcctggctgtgtttggaggtattctaatgccagttggagacctgcttatccagaagacaattaaaaagcaagttgtcctcgaagaaggtacaattgcttttaaaaattgggttaaaacaggcacagaagtttacagacagttttggatctttgatgtgcaaaatccacaggaagtgatgatgaacagcagcaacattcaagttaagcaaagaggtccttatacgtacagagttcgttttctagccaaggaaaatgtaacccaggacgctgaggacaacacagtctctttcctgcagcccaatggtgccatcttcgaaccttcactatcagttggaacagaggctgacaacttcacagttctcaatctggctgtggcagctgcatcccatatctatcaaaatcaatttgttcaaatgatcctcaattcacttattaacaagtcaaaatcttctatgttccaagtcagaactttgagagaactgttatggggctatagggatccatttttgagtttggttccgtaccctgttactaccacagttggtctgttttatccttacaacaatactgcagatggagtttataaagttttcaatggaaaagataacataagtaaagttgccataatcgacacatataaaggtaaaaggaatctgtcctattgggaaagtcactgcgacatgattaatggtacagatgcagcctcatttccaccttttgttgagaaaagccaggtattgcagttcttttcttctgatatttgcaggtcaatctatgctgtatttgaatccgacgttaatctgaaaggaatccctgtgtatagatttgttcttccatccaaggcctttgcctctccagttgaaaacccagacaactattgtttctgcacagaaaaaattatctcaaaaaattgtacatcatatggtgtgctagacatcagcaaatgcaaagaagggagacctgtgtacatttcacttcctcattttctgtatgcaagtcctgatgtttcagaacctattgatggattaaacccaaatgaagaagaacataggacatacttggatattgaacctataactggattcactttacaatttgcaaaacggctgcaggtcaacctattggtcaagccatcagaaaaaattcaagtattaaagaatctgaagaggaactatattgtgcctattctttggcttaatgagactgggaccattggtgatgagaaggcaaacatgttcagaagtcaagtaactggaaaaataaacctccttggcctgatagaaatgatcttactcagtgttggtgtggtgatgtttgttgcttttatgatttcatattgtgcatgcagatcgaaaacaataaaataaacctggctcaagcacaaaccaatttgtgttgttctgattcaataattggtttctgggtggccaattcagaagaagagtgtacatgctcaacagtctccaggaccatcagtatactgcatttcatgtgcaccaaatattttgaaagacatttataaataattggcttatgactcatatttctctatgaataccttcatacagcaggtataactcttttctttatgggcttaaatattttgtcactgatcctgcaaatggacatcattttagcacactagcggtttatattttaaggaccttcattctctgttctgcacctcttctggaaattgagtaaattttgctttttttttttactcagttgcaacttacgcttggcatcttcagaatgcttttctagcattaagagatgtaaatgataaaggaattattgtatgaaatattacaaagcgtagactatgcattgttattcattataatattttttgctgtcataatcgcctcataaagacaggtttcaaccattaaaatatgttcttcctt

SEQ ID NO: 5005 - DNA, 291 bp, Homo sapiens
tacaggtcaaaaaatgtagaaaatatcattttatattccctaatctatatagctgaaaaagggttgtattttcttagctgaatatgaatacctcttaaacataaattagttcctctccagtgaagtatcttattttaccaatccatttcaggaaagaggttctgctgccgtaaagcgagaaattttatttttatcccttttatttgaatgagagatttgaaaatcgaattatgtaaatatttcaatgcatctgctattattttgtggagtttattaaactactttaaaaaa

SEQ ID NO: 5006 - DNA, 550 bp, Homo sapiens
  misc_feature (1)..(550): n=a,t,g or c
ntaatactgagagcggaagatttttttaaagagatatggtagtttaaataggtttgtttaaagaactcttgggaaatttcttaacaaattgtaattgtttttataaaccttcctacagagttgtgtaccattcatcatcaccatcatttaatatctgtaagtgcccagaaggtacaaggtgctatacagccgttaaacaccccctccctgcaactgtttaaaattagaatagatttttgcatcaaccactgctagaagctttccccacctaggtggcctggcaagggcctgcattcccaacatcccattacatgtttcccactccagaaagtctctggggtttattccagcntttttatcntggacgtgtcccntttcaccccctgggtttgggttgggttgggtttgttttttaaantcaggaaagttttcagggattcaaagggggtcnggacnttttttaacccggcggagtacaggtccntttttttgctanggttttgttgtggtacaggnaaccccanttggccnttagtgtgtgggtagttgt

SEQ ID NO: 5007 - DNA, 123 bp, Homo sapiens; identical to SEQ ID NO: 622

SEQ ID NO: 5008 - DNA, 298 bp, Homo sapiens; identical to SEQ ID NO: 666

SEQ ID NO: 5009 - DNA, 301 bp, Homo sapiens; identical to SEQ ID NO: 3436
  misc_feature (1)..(301): n=a,t,g or c

SEQ ID NO: 5010 - DNA, 2015 bp, Homo sapiens
cggaggcacggaagatgaggaagatgatcaggaggatgatgaaggtgaagagggagatgaagacgatgacgacgatggctctgaggggacctcaggggctgccgagctgggggggcgctcaagctgcgaggatccgggctgcccgcgagacgaggagcgggcgccaggatggggtcgatgaagtccaagttcctccaggtcggaggcaatacattctcaaaaactgaaaccagcgccagcccacactgtcctgtgtacgtgccggatcccacatccaccatcaagccggggcctaatagccacaacagcaacacaccaggaatcagggaggcaggctctgaggacatcatcgtggttgccctgtatgattacgaggccattcaccacgaagacctcagcttccagaagggggaccagatggtggtcctagaggaatccggggagtggtggaaggctcgatccctggccacccggaaggagggctacatcccaagcaactatgtcgcccgcgttgactctctggagacagaggagtggtttttcaagggcatcagccggaaggacgcagagcgccaactgctggctcccggcaacatgctgggctccttcatgatccgggatagcgagaccactaaaggaagctactctttgtccgtgcgagactacgaccctcggcagggagataccgtgaaacattacaagatccggaccctggacaacgggggcttctacatatccccccgaagcaccttcagcactctgcaggagctggtggaccactacaagaaggggaacgacgggctctgccagaaactgtcggtgccctgcatgtcttccaagccccagaagccttgggagaaagatgcctgggagatccctcgggaatccctcaagctggagaagaaacttggagctgggcagtttggggaagtctggatggccacctacaacaagcacaccaaggtggcagtgaagacgatgaagccagggagcatgtcggtggaggccttcctggcagaggccaacgtgatgaaaactctgcagcatgacaagctggtcaaacttcatgcggtggtcaccaaggagcccatctacatcatcacggagttcatggccaaaggaagcttgctggactttctgaaaagtgatgagggcagcaagcagccattgccaaaactcattgacttctcagcccagattgcagaaggcatggccttcatcgagcagaggaactacatccaccgagacctccgagctgccaacatcttggtctctgcatccctggtgtgtaagattgctgactttggcctggcccgggtcattgaggacaacgagtacacggctcgggaaggggccaagttccccatcaagtggacagctcctgaagccatcaactttggctccttcaccatcaagtcagacgtctggtcctttggtatcctgctgatggagatcgtcacctacggccggatcccttacccagggatgtcaaaccctgaagtgatccgagctctggagcgtggataccggatgcctcgcccagagaactgcccagaggagctctacaacatcatgatgcgctgctggaaaaaccgtccggaggagcggccgaccttcgaatacatccagagtgtgctggatgacttctacacggccacagagagccagtaccaacagcagccatgatagggaggaccagggcagggcagggggtgcccaggtggtggctcgaaggtggctccagcaccatccgccagggcccacacccccttcctactcccagacacccaccctcgcttcagccacagtttcctcatctgtccagtgggtaggttggactggaaaatctctttttgactcttgcaatccacaatctgacattctcaggaagcccccaagttgatatttctatttcctggaatggttggattttagttacagctgtgatttggaagggaaactttcaaaatagtgaaatgaatatttaaataaaagatataaatgcaagtcttacg

SEQ ID NO: 5011 - DNA, 262 bp, Homo sapiens
taacaaatggatgactttattacgagagaaggacaagactgatgtttaccttggtcaaaccatccaggaaaacaaagcacacagacttatagaatactttggtttaaaaattattcataatatcaatattaaacctgatgtttaaagaacctaatgagaaatatagtgtaaaaaacaaaccatgaaaacacaagtttgcatagatgaattaatgtagatgtacaattggcatttaaaaaaggaggtttgcgttttgggagtg

SEQ ID NO: 5012 - DNA, 387 bp, Homo sapiens
ttttatctgcacatactaagttgcttttattaatccagaacggcatgctacagatactgtacagcatgaacatttattcattacaaaaatggcttccaaaccattaaaaatgaacttggaataagagcataaaacggaacagtaacatcacaactgttaggaaacattcaaagtattcacaaaaaatgttatagttagcattttaataaaccagagaaaaatcggagacagttttacaatcgcttcatgtcaactacaatggcactgaatgaacaggtttcagctttatacagcattttgcaacatcaacatgcctaggttttttttatttttaaagtctgctgcctactcgtatgtaatatgtgtacataaaagcggcctgggttt

SEQ ID NO: 5013 - DNA, 374 bp, Homo sapiens
  misc_feature (1)..(374): n=a,t,g or c
aattttaatagataaatgtaaatttgactgtgtaataccaaatggaaagtagctgaaccacacagagaaaacaaggctttacgtatctccaaatttagctgttttacaataaacaaagtattagaacatgtgaatattagaacctccttctaactggaaagatttcttcagtaagctataaccgaaattaatataaactaaaattanaatttctaaaataagaattaacaaaccaaatttaagtatttttagtcagagattgaaacaaaataagcacagtgatctagaaaccaaatatactggnttatgtaactatcgtatcaaggtacagacattcttcacatggctacaagggttagcatttctcctcgtgg

SEQ ID NO: 5014 - DNA, 411 bp, Homo sapiens
  misc_feature (1)..(411): n=a,t,g or c
tttntntgcaaagagaaataggctcgtttattnattcattgatcaactggcacttcttgaaancctgctgtgtgccaagcctttccccaaaggaggatatcagtgnnnnagnaagtctcagggtggaaaggacctggaccacacagagcaggactccagagcctcctccatatggcaggaatcaagctttcacaggggaaacgcaggatttcccacacatgcccatgcaacacttcaagtcacgcttgcactggccatccatctcacagaaattgggggggttnagcatcnaacattggccanaantcactnggnacttnccaagggttncnccttgttgggnttnggggggtnnacaggggncccggcanttnatgcnccaagtttcngggcaaanatttcttttttccc

SEQ ID NO: 5015 - DNA, 492 bp, Homo sapiens; identical to SEQ ID NO: 1000

SEQ ID NO: 5016 - DNA, 594 bp, Homo sapiens
gtcactcctgccttcaccatgaagtccagcggcctcttccccttcctggtgctgcttgccctgggaactctggcaccttgggctgtggaaggctctggaaagtccttcaaagctggagtctgtcctcctaagaaatctgcccagtgccttagatacaagaaacctgagtgccagagtgactggcagtgtccagggaagaagagatgttgtcctgacacttgtggcatcaaatgcctggatcctgttgacaccccaaacccaacaaggaggaagcctgggaagtgcccagtgacttatggccaatgtttgatgcttaacccccccaatttctgtgagatggatggccagtgcaagcgtgacttgaagtgttgcatgggcatgtgtgggaaatcctgcgtttcccctgtgaaagcttgattcctgccatatggaggaggctctggagtcctgctctgtgtggtccaggtcctttccaccctgagacttggctccaccactgatatcctcctttggggaaaggcttggcacacagcaggctttcaagaagtgccagttgatcaatgaataaataaacgagcctatttctctttgcac

SEQ ID NO: 5017 - DNA, 607 bp, Homo sapiens
  misc_feature (1)..(607): n=a,t,g or c
tagccctgaaccaggagcaacagggtcagcttctggaggttggttggaacaatacggcaagtgctcgaaatgacatccagagaaatctaaactgctgtgggttccgaagtgttaacccaaatgacacctgtctggctagctgtgttaaaagtgaccactcgtgctcgccatgtgctccaatcataggagaatatgctggagaggttttgagatttgttggtggcattggcctgttcttcagttttacagagatcctgggtgtttggctgacctacagatacaggaaccagaaagacccccgcgcgaatcctagtgcattcctttgatgagaaaacaaggaagatttcctttcgtattatgatcttgttcactttctgtaattttctgttaagctccatttgccagtttaagggaaggaaacactattctgggaaagtaccttattgatagtgggattattatatttttacttctatgtttctctacatgtttttttttttcccntgctgaaaatatttgnaacttgtggnctccgaggtccgtggccccgganttactgtattcattgtcgggantttcnctgtggccttctaggattttacccgag

SEQ ID NO: 5018 - DNA, 418 bp, Homo sapiens
ggttttgaacctttaataaaagtaaaaaatgaatgcaaaaagaacacaatgttgaaaacttagtatgaatgtgaacctcactagatgttcaaatctggtagagtgcaaattttgttcatactattttacatttttacaaactcaaatcactttggttcatatattttctataaactattggcaaaaaaatcctcaaatttacattcttttggctacattatttctaacagatatagatttacttccggtttcggagagaaagacttattgtgtgtgcgtgatcaagtctgttttaaagattcactcgctgctttcatctaataacttctggtttttcataaaatgctgacatcttcattggaaatttttttcatgtaactgttttcattttcagaaaatatataagggggtcattccg

SEQ ID NO: 5019 - DNA, 244 bp, Homo sapiens
  misc_feature (1)..(244): n=a,t,g or c
ggttcctttaagcttatttaatatttgaaatcttatttnctatttncccagaccccagaaaacagaaagtttttagatgaccaatattttgttccagaaacatacagccttatcagctaattgcataaaagagcctattttacaaaggtacatctggataattaggaacaataaagtncttttagggcatttgcaaaatgtggatcagtaaaaatacatggattattcaataaagtttttttaa

SEQ ID NO: 5020 - DNA, 3038 bp, Homo sapiens
gcgtgaggaaagtaccaaacagcagcggagttttaaactttaaatagacaggtctgagtgcctgaacttgccttttcattttacttcatcctccaaggagttcaatcacttggcgtgacttcactacttttaagcaaaagagtggtgcccaggcaacatgggtgactggagcgccttaggcaaactccttgacaaggttcaagcctactcaactgctggagggaaggtgtggctgtcagtacttttcattttccgaatcctgctgctggggacagcggttgagtcagcctggggagatgagcagtctgcctttcgttgtaacactcagcaacctggttgtgaaaatgtctgctatgacaagtctttcccaatctctcatgtgcgcttctgggtcctgcagatcatatttgtgtctgtacccacactcttgtacctggctcatgtgttctatgtgatgcgaaaggaagagaaactgaacaagaaagaggaagaactcaaggttgcccaaactgatggtgtcaatgtggacatgcacttgaagcagattgagataaagaagttcaagtacggtattgaagagcatggtaaggtgaaaatgcgaggggggttgctgcgaacctacatcatcagtatcctcttcaagtctatctttgaggtggccttcttgctgatccagtggtacatctatggattcagcttgagtgctgtttacacttgcaaaagagatccctgcccacatcaggtggactgtttcctctctcgccccacggagaaaaccatcttcatcatcttcatgctggtggtgtccttggtgtccctggccttgaatatcattgaactcttctatgttttcttcaagggcgttaaggatcgggttaagggaaagagcgacccttaccatgcgaccagtggtgcgctgagccctgccaaagactgtgggtctcaaaaatatgcttatttcaatggctgctcctcaccaaccgctcccctctcgcctatgtctcctcctgggtacaagctggttactggcgacagaaacaattcttcttgccgcaattacaacaagcaagcaagtgagcaaaactgggctaattacagtgcagaacaaaatcgaatggggcaggcgggaagcaccatctctaactcccatgcacagccttttgatttccccgatgataaccagaattctaaaaaactagctgctggacatgaattacagccactagccattgtggaccagcgaccttcaagcagagccagcagtcgtgccagcagcagacctcggcctgatgacctggagatctagatacaggcttgaaagcatcaagattccactcaattgtggagaagaaaaaaggtgctgtagaaagtgcaccaggtgttaattttgatccggtggaggtggtactcaacagccttattcatgaggcttagaaaacacaaagacattagaatacctaggttcactgggggtgtatggggtagatgggtggagagggaggggataagagaggtgcatgttggtatttaaagtagtggattcaaagaacttagattataaataagagttccattaggtgatacatagataagggctttttctccccgcaaacacccctaagaatggttctgtgtatgtgaatgagcgggtggtaattgtggctaaatatttttgttttaccaagaaactgaaataattctggccaggaataaatacttcctgaacatcttaggtcttttcaacaagaaaaagacagaggattgtccttaagtccctgctaaaacattccattgttaaaatttgcactttgaaggtaagctttctaggcctgaccctccaggtgtcaatggacttgtgctactatatttttttattcttggtatcagtttaaaattcagacaaggcccacagaataagattttccatgcatttgcaaatacgtatattctttttccatccacttgcacaatatcattaccatcactttttcatcattcctcagctactactcacattcatttaatggtttctgtaaacatttttaagacagttgggatgtcacttaacattttttttttttgagctaaagtcagggaatcaagccatgcttaatatttaacaatcacttatatgtgtgtcgaagagtttgttttgtttgtcatgtattggtacaagcagatacagtataaactcacaaacacagatttgaaaataatgcacatatggtgttcaaatttgaacctttctcatggatttttgtggtgtgggccaatatggtgtttacattatataattcctgctgtggcaagtaaagcacactttttttttctcctaaaatgtttttccctgtgtatcctattatggatactggttttgttaattatgattctttattttctctcctttttttaggatatagcagtaatgctattactgaaatgaatttcctttttctgaaatgtaatcattgatgcttgaatgatagaattttagtactgtaaacaggctttagtcattaatgtgagagacttagaaaaaatgcttagagtggactattaaatgtgcctaaatgaattttgcagtaactggtattcttgggttttcctacttaatacacagtaattcagaacttgtattctattatgagtttagcagtcttttggagtgaccagcaactttgatgtttgcactaagattttatttggaatgcaagagaggttgaaagaggattcagtagtacacatacaactaatttatttgaactatatgttgaagacatctaccagtttctccaaatgccttttttaaaactcatcacagaagattggtgaaaatgctgagtatgacacttttcttcttgcatgcatgtcagctacataaacagttttgtacaatgaaaattactaatttgtttgacattccatgttaaactacggtcatgttcagcttcattgcatgtaatgtagacctagtccatcagatcatgtgttctggagagtgttctttattcaataaagttttaatttagtataaacat

SEQ ID NO: 5021 - DNA, 410 bp, Homo sapiens
gtgaaagcatgtgatcatactaacccagcctcctggaatgtcgctgtacgatgattgatgtctttttctcagtccatagttacaattgtttagtatgctaatcagtccagttccctgaggtttaagatcaaatataaattactctgcttttcgactcattcaggtagcattgtacctgaacctgattgctactttttcatcttaaatattatatttcctcatctaatctgccttcccctcgtccacagacatttggagaaggaaatgggagggtgtctgttatccctttctctttgctttgtccccgttgttagactggcagcgtcagttgctcggtgggcttggttagagccgtgggtgaggcaggtggctggcggggacagggagaggctgagagggaagtggtggca

SEQ ID NO: 5022 - DNA, 427 bp, Homo sapiens; identical to SEQ ID NO: 621

SEQ ID NO: 5023 - DNA, 5959 bp, Homo sapiens
gaattccggatgctcagatgaaagccccgagatcacagagacccggcgagatcacagagacccggcctgaaggaacgtggaaagaccaatgtacctgttttgaccggttgcctggagcaagaagttccagttggggagaattttcagaagataaagtcggagattgtggaaagacttgacttgcagcattactctactgactggcagagacaggagaggtagatgtcaacgcccacagaccctggtgcgatgccccacccagggccttcgccgggtcctgggccttcccctgggccaattcttgggcctagtccaggaccaggaccatccccaggttccgtccacagcatgatggggccaagtcctggacctccaagtgtctcccatcctatgccgacgatggggtccacagacttcccacaggaaggcatgcatcaaatgcataagcccatcgatggtatacatgacaaggggattgtagaagacatccattgtggatccatgaagggcactggtatgcgaccacctcacccaggcatgggccctccccagagtccaatggatcaacacagccaaggttatatgtcaccacacccatctccattaggagccccagagcacgtctccagccctatgtctggaggaggcccaactccacctcagatgccaccaagccagccgggggccctcatcccaggtgatccgcaggccatgagccagcccaacagaggtccctcacctttcagtcctgtccagctgcatcagcttcgagctcagattttagcttataaaatgctggcccgaggccagcccctccccgaaacgctgcagcttgcagtccaggggaaaaggacgttgcctggcttgcagcaacaacagcagcagcaacagcagcagcagcagcagcagcagcagcagcagcagcagcaacagcagccgccgcaaccacagacgcagcaacaacagcagccggcccttgttaactacaacagaccatctggcccggggccggagctgagcggcccgagcaccccgcagaagctgccggtgcccgcgcccggcggccggccctcgcccgcgccccccgcagccgcgcagccgcccgcggccgcagtgcccgggccctcagtgccgcagccggccccggggcagccctcgcccgtcctccagctgcagcagaagcagagccgcatcagccccatccagaaaccgcaaggcctggaccccgtggaaattctgcaagagcgggaatacagacttcaggcccgcatagctcataggatacaagaactggaaaatctgcctggctctttgccaccagatttaagaaccaaagcaaccgtggaactaaaagcacttcggttactcaatttccagcgtcagctgagacaggaggtggtggcctgcatgcgcagggacacgaccctggagacggctctcaactccaaagcatacaaacggagcaagcgccagactctgagagaagctcgcatgaccgagaagctggagaagcagcagaagattgagcaggagaggaaacgccgtcagaaacaccaggaatacctgaacagtattttgcaacatgcaaaagattttaaggaatatcatcggtctgtggccggaaagatccagaagctctccaaagcagttgcaacttggcatgccaacactgaaagagagcagaagaaggagacagagcggattgaaaaggagagaatgcggcgactgatggctgaagatgaggagggttatagaaaactgattgatcaaaagaaagacaggcgtttagcttaccttttgcagcagaccgatgagtatgtagccaatctgaccaatctggtttgggagcacaagcaagcccaggcagccaaagagaagaagaagaggaggaggaggaagaagaaggctgaggagaatgcagagggtggggagtctgccctgggaccggatggagagcccatagatgagagcagccagatgagtgacctccctgtcaaagtgactcacacagaaaccggcaaggttctgttcggaccagaagcacccaaagcaagtcagctggacgcctggctggaaatgaatcctggttatgaagttgcccctagatctgacagtgaagagagtgattctgattatgaggaagaggatgaggaagaagagtccagtaggcaggaaaccgaagagaaaatactcctggatccaaatagcgaagaagtttctgagaaggatgctaagcagatcattgagacagctaagcaagacgtggatgatgaatacagcatgcagtacagtgccaggggctcccagtcctactacaccgtggctcatgccatctcggagtgggtggagaaacagtctgccctcctaattaatgggaccctaaagcattaccagctccagggcctggaatggatggtttccctgtataataacaacttgaacggaatcttagccgatgaaatggggcttggaaagaccatacagaccattgcactcatcacttatctgatggagcacaaaagactcaatggcccctatctcatcattgttcccctttcgactctatctaactggacatatgaatttgacaaatgggctccttctgtggtgaagatttcttacaagggtactcctgccatgcgtcgctcccttgtcccccagctacggagtggcaaattcaatgtcctcttgactacttatgagtatattataaaagacaagcacattcttgcaaagattcggtggaaatacatgatagtggacgaaggccaccgaatgaagaatcaccactgcaagctgactcaggtcttgaacactcactatgtggcccccagaaggatcctcttgactgggaccccgctgcagaataagctccctgaactctgggccctcctcaacttcctcctcccaacaatttttaagagctgcagcacatttgaacaatggttcaatgctccatttgccatgactggtgaaagggtggacttaaatgaagaagaaactatattgatcatcaggcgtctacataaggtgttaagaccatttttactaaggagactgaagaaagaagttgaatcccagcttcccgaaaaagtggaatatgtgatcaagtgtgacatgtcagctctgcagaagattctgtatcgccatatgcaagccaaggggatccttctcacagatggttctgagaaagataagaaggggaaaggaggtgctaagacacttatgaacactattatgcagttgagaaaaatctgcaaccacccatatatgtttcagcacattgaggaatcctttgctgaacacctaggctattcaaatggggtcatcaatggggctgaactgtatcgggcctcagggaagtttgagctgcttgatcgtattctgccaaaattgagagcgactaatcaccgagtgctgcttttctgccagatgacatctctcatgaccatcatggaggattattttgcttttcggaacttcctttacctacgccttgatggcaccaccaagtctgaagatcgtgctgctttgctgaagaaattcaatgaacctggatcccagtatttcattttcttgctgagcacaagagctggtggcctgggcttaaatcttcaggcagctgatacagtggtcatctttgacagcgactggaatcctcatcaggatctgcaggcccaagaccgagctcaccgcatcgggcagcagaacgaggtccgggtactgaggctctgtaccgtgaacagcgtggaggaaaagatcctcgcggccgcaaaatacaagctgaacgtggatcagaaagtgatccaggcgggcatgtttgaccaaaagtcttcaagccacgagcggagggcattcctgcaggccatcttggagcatgaagaggaaaatgaggaagaagatgaagtaccggacgatgagactctgaaccaaatgattgctcgacgagaagaagaatttgacctttttatgcggatggacatggaccggcggagggaagatgcccggaacccgaaacggaagccccgtttaatggaggaggatgagctgccctcctggatcattaaggatgacgctgaagtagaaaggctcacctgtgaagaagaggaggagaaaatatttgggagggggtcccgccagcgccgtgacgtggactacagtgacgccctcacggagaagcagtggctaagggccatcgaagacggcaatttggaggaaatggaagaggaagtacggcttaagaagcgaaaaagacgaagaaatgtggataaagatcctgcaaaagaagatgtggaaaaagctaagaagagaagaggccgccctcccgctgagaaactgtcaccaaatccccccaaactgacaaagcagatgaacgctatcatcgatacgtgtataaactacaaagatagttgtaacgtggagaaggtgcccagtaattctcagttggaaatagaaggaaacagttcagggcgacagctcagtgaagtcttcattcagttaccttcaaggaaagaattaccagaatactatgaattaattaggaagccagtggatttcaaaaaaataaaggaaaggattcgtaatcataagtaccggagcctaggcgacctggagaaggatgtcatgcttctctgtcacaacgctcagacgttcaacctggagggatcccagatctatgaagactccatcgtcttacagtcagtgtttaagagtgcccggcagaaaattgccaaagaggaagagagtgaggatgaaagcaatgaagaggaggaagaggaagatgaagaagagtcagagtccgaggcaaaatcagtcaaggtgaaaattaagctcaataaaaaagatgacaaaggccgggacaaagggaaaggcaagaaaaggccaaatcgaggaaaagccaaacctgtagtgagcgattttgacagcgatgaggagcaggatgaacgtgaacagtcagaaggaagtgggacggatgatgagtgatcagtatggacctttttccttggtagaactgaattccttcctcccctgtctcatttctacccagtgagttcatttgtcatataggcactgggttgtttctatatcatcatcgtctataaactagctttaggatagtgccagacaaacatatgatatcatggtgtaaaaaacacacacatacacaaatatttgtaacatattgtgaccaaatgggcctcaaagattcagattgaaacaaacaaaaagcttttgatggaaaatatgtgggtggatagtatatttctatgggtgggtctaatttggtaacggtttgattgtgcctggttttatcacctgttcagatgagaagatttttgtcttttgtagcactgataaccaggagaagccattaaaagccactggttattttatttttcatcaggcaattttcgaggtttttatttgttcggtattgtttttttacactgtggtacatataagcaactttaataggtgataaatgtacagtagttagatttcacctgcatatacgtttttccattttatgctctatgatctgaacaaaagctttttgaattgtataagatttatgtctactgtaaacattgcttaatttttttgctcttgatttaaaaaaaagttttgttgaaagcgctattgaatattgcaatctatatagtgtattggatggcttcttttgtcaccctgatctcctatgttaccaatgtgtatcgtctccttctccctaaagtgtacttaatctttgctttctttgcacaatgtctttggttgcaagtcataagcctgaggcaaataaattccagtaatttcgaagaatgtggtgttggtgctttcctaataaagaaataatttcgcttgaaaaaaaaaaaaaaaaaaaaaaaaaaaaaaaaaaaaaaaaaaaaaaaaaaaaaaaaaaaaaaaaaaaaaaaaaaaaaaaaaaaaaaaaaaggaattc

SEQ ID NO: 5024 - DNA, 607 bp, Homo sapiens
  misc_feature (1)..(607): n=a,t,g or c
caaattttatttgtatacaaaaatatattataatgngaaagcttactgctatttccaactatatataattaattacaaatattttcataaaagcactttaaattacaggaaagctatgttttaagagaaaatacaatattagcatggatcgtctgttctaatatgctgcaagaggtaaacaaagtcagtttcactgtctaaattgcccagaaatgggatcaagggctgattttaaggtgagcctgagagtggcctggtagaaggttnagtgcacgtctttgtcccctctggcagcagattctagtagctgattttagcaggtcctcggaactttctgaagcttctcccttatgatgaaaggacccagaacttcttgtttcacatacttgctaaagttttgtcaagatcagcaatgaaggcttctagctcnttngtgtctcctaatttagctttctgaggagtgacagtggcagagagaagagctggggtagagtctgttggagaattcagnttttcatcactgaagctgagctgttcctataaagtgaatntgcactctccgagtcgctgaagccgctgttgtcgctgcgcttggctgctcgcnttc

SEQ ID NO: 5025 - DNA, 668 bp, Homo sapiens
  misc_feature (1)..(668): n=a,t,g or c
accacctgactcagacttctttgtcgttgttttatttaaaatgttattgtctctgattagaaaatacagtcatgagggctaaaaactgaaatgatgtgaaaaggcatccattaagcagtgttgccccaccaccctttccatcagtcttgtctcatggggatggggaaaatgaagacagaacgctttgccttgctttgcaatccctcctttgaaggccttctgtcccaggaagccaatgttcatttgatgtggaagagggacctgtgtttaaccagaagctgtcctccctcatccctttcccatggcttacacgcagaagggagaggagatgaccagaggagaaatcaggggaagaaaaggcaacaggggaggcaaagggaaaggagaggaatgcttaaaatatacagtgaaatttgagtaggattctctactcaaagacttctctgggaagtgtccagaattgaccacacaggtgctgacggtagaaagaacacagacccanaaccctgatctagttgcattaactccattagccctgagttccctgtaaaatgaagactgtngaggaccactagaggattctgtgacttctcaactctaaaattttggactggacctcgtgcgaatctggctcgaggcaaattcctatgtggcgatnaatcgnacag

SEQ ID NO: 5026 - DNA, 262 bp, Homo sapiens
ccttcttttacctttatattgatatttaaaagaaaaagaacatgatggatacgggaatgggggaagggacaacggttctacgattaacaacaggaactgataggaaccagaagctccaaggatttaaaaaaaaataaaatatatatttatacatttatatatatatatatatatcacgttatgtatgtgagtcccagacaagcaggaagcagcagcaagaagcaactagcacacagaaacacccgtgcgtgtgcactacaca

SEQ ID NO: 5027 - DNA, 214 bp, Homo sapiens
  misc_feature (1)..(214): n=a,t,g or c
cacannntnnggaacattttattcctcaggacgctacacgntcactttcctggcggnaggntcagtgcatcgagttctgtttccgtggaaaatgtgcaccttggaaactgcatgacagccccctcggcagggtccccgcggatccgccggaacgcaggcacagcagcaagttcctccagcacgaagntggcctgcccgggcccagggtttgagg

SEQ ID NO: 5028 - DNA, 5759 bp, Homo sapiens
ataccctgtggtgctagtgtaaaatcaaatataatctacctctttagcttttctgttatgtaattggaatgaaaaaatagtgcttttttttttttttcatttttgagattgagttaccatggagggaaagaacatgtgttttaccagtggaacgcattctttgtgttatctcttcgatttttaacattttatgtttccagtttataaactttgcctccagtttgatgaagaaaatttagctattagaaagtatttaaaatctcaaaagtatgacattttaaaatgttagcaggtttaaagataacttagtttttcaactcttaacccaaaattatacttgtatactataatttgtgttgaattacttggtattatttatcatcctagtaagatctattttatataatttgattcactttttatattgaattatgttaattgtttttgtaatacacctttcatatttcttcaaagaaaactagtgttgggttattgctaattttgcttcgtggtttggttatttacatataaaaattatattgttttaaaaattgcaaagtgatcatttattgacacatcagcaagaattaatgttgaaatgcaagttttttcccctatccttaactaagtgtgtagatatctttgttttgtttctttaatagatagcaaacaataaagatgcattgaggaagacatggaaccctaagtttacattgagaagtcactttgatggcatccgagcccttgctttccatcccattgagcctgttttgataacagcatcagaggatcacacattaaaaatgtggaatttacagaaaacagccccagccaaaaagtgagaatattctactttaacattatttgaatattttaagtaacattttcagcagaaaactacatattttatgatttctgttaaatttcccaaacatttcttctagttctttcttccatgtcatgtaatttattgtgtttttccatttatacaacctaatgctaggttagaaaactgatgcttaggaagatatggtattatcttttggtttcaccagggtttgtgaatactgattacagtctttatacataacagtatttttaaatggctgctatatttggggagccccttgtctatactgaaggtttggactgttcttgtaaacaggtatatgcatctttaaaataatcaaatgtccacctccaccttgccccattgtttactagatttagacttatgagatggagcagagaaaagcctcactgggatgggtggagggtcttggtcttgtcttttggccttgagactttaggtactttccatacccaccaatatgtctagactcagaggctaacatgactgctagtgctcaccttggccctttagttcctgtctaagcatggatagacatgagttagtataaaccctttaaaagtcacaaagctaaatctggttctacttgcttgggtccttatcggagctccactcctttgggtcacatgtcaaaaaaaaaaaaaaaaaggcgccgtccgctgcgctgggggctcggtctatgacgagcagcggggtctgccatgggtcgggggctgctcaggggcctgtggccgctgcacatcgtcctgtggacgcgtatcgccagcacgatcccaccgcacgttcagaagtcggttaataacgacatgatagtcactgacaacaacggtgcagtcaagtttccacaactgtgtaaattttgtgatgtgagattttccacctgtgacaaccagaaatcctgcatgagcaactgcagcatcacctccatctgtgagaagccacaggaagtctgtgtggctgtatggagaaagaatgacgagaacataacactagagacagtttgccatgaccccaagctcccctaccatgactttattctggaagatgctgcttctccaaagtgcattatgaaggaaaaaaaaaagcctggtgagactttcttcatgtgttcctgtagctctgatgagtgcaatgacaacatcatcttctcagaagaatataacaccagcaatcctgacttgttgctagtcatatttcaagtgacaggcatcagcctcctgccaccactgggagttgccatatctgtcatcatcatcttctactgctaccgcgttaaccggcagcagaagctgagttcaacctgggaaaccggcaagacgcggaagctcatggagttcagcgagcactgtgccatcatcctggaagatgaccgctctgacatcagctccacgtgtgccaacaacatcaaccacaacacagagctgctgcccattgagctggacaccctggtggggaaaggtcgctttgctgaggtctataaggccaagctgaagcagaacacttcagagcagtttgagacagtggcagtcaagatctttccctatgaggagtatgcctcttggaagacagagaaggacatcttctcagacatcaatctgaagcatgagaacatactccagttcctgacggctgaggagcggaagacggagttggggaaacaatactggctgatcaccgccttccacgccaagggcaacctacaggagtacctgacgcggcatgtcatcagctgggaggacctgcgcaagctgggcagctccctcgcccgggggattgctcacctccacagtgatcacactccatgtgggaggcccaagatgcccatcgtgcacagggacctcaacagctccaatatcctcgtgaagaacgacctaacctgctgcctgtgtgactttgggctttccctgcgtctggaccctactctgtctgtggatgacctggctaacagtgggcaggtgggaactgcaagatacatggctccagaagtcctagaatccaggatgaatttggagaatgctgagtccttcaagcagaccgatgtctactccatggctctggtgctctgggaaatgacatctcgctgtaatgcagtgggagaagtaaaagattatgagcctccatttggttccaaggtgcgggagcacccctgtgtcgaaagcatgaaggacaacgtgttgagagatcgagggcgaccagaaattcccagcttctggctcaaccaccagggcatccagatggtgtgtgagacgttgactgagtgctgggaccacgacccagaggcccgtctcacagcccagtgtgtggcagaacgcttcagtgagctggagcatctggacaggctctcggggaggagctgctcggaggagaagattcctgaagacggctccctaaacactaccaaatagctcttctggggcaggctgggccatgtccaaagaggctgcccctctcaccaaagaacagaggcagcaggaagctgcccctgaactgatgcttcctggaaaaccaagggggtcactcccctccctgtaagctgtggggataagcagaaacaacagcagcagggagtgggtgacatagagcattctatgccttttacattgtcataggataagctgtgttagcacttcctcaggaaatgagattgattttacaatagccaataacatttgcactttattaatgcctgtatataaatatgaatagctatgttttatatatatatatatatatctatatatgtctatagctctatatatatagccataccttgaaaagagacaaggaaaaacatcaaatattcccaggaaattggttttattggagaactccagaaccaagcagagaaggaagggacccatgacagcattagcatttgacaatcacacatgcagtggttctctgactgtaaaacagtgaactttgcatgaggaaagaggctccatgtctcacagccagctatgaccacattgcacttgcttttgcaaaataatcattccctgcctagcacttctcttctggccatggaactaagtacagtggcactgtttgaggaccagtgttcccggggttcctgtgtgcccttatttctcctggacttttcatttaagctccaagccccaaatctggggggctagtttagaaactctccctcaacctagtttagaaactctaccccatctttaataccttgaatgttttgaaccccactttttaccttcatgggttgcagaaaaatcagaacagatgtccccatccatgcgattgccccaccatctactaatgaaaaattgttctttttttcatctttcccctgcacttatgttactattctctgctcccagccttcatccttttctaaaaaggagcaaattctcactctaggctttatcgtgtttactttttcattacacttgacttgattttctagttttctatacaaacaccaatgggttccatctttctgggctcctgattgctcaagcacagtttggcctgatgaagaggatttcaactacacaatactatcattgtcaggactatgacctcaggcactctaaacatatgttttgtttggtcagcacagcgtttcaaaaagtgaagccactttataaatatttggagattttgcaggaaaatctggatccccaggtaaggatagcagatggttttcagttatctccagtccacgttcacaaaatgtgaaggtgtggagacacttacaaagctgcctcacttctcactgtaaacattagctctttccactgcctacctggaccccagtctaggaattaaatctgcacctaaccaaggtcccttgtaagaaatgtccattcaagcagtcattctctgggtatataatatgattttgactaccttatctggtgttaagatttgaagttggccttttattggactaaaggggaactcctttaagggtctcagttagcccaagtttcttttgcttatatgttaatagttttaccctctgcattggagagaggagtgctttactccaagaagctttcctcatggttaccgttctctccatcatgccagccttctcaacctttgcagaaattactagagaggatttgaatgtgggacacaaaggtcccatttgcagttagaaaatttgtgtccacaaggacaagaacaaagtatgagctttaaaactccataggaaacttgttaatcaacaaagaagtgttaatgctgcaagtaatctcttttttaaaactttttgaagctacttattttcagccaaataggaatattagagagggactggtagtgagaatatcagctctgtttggatggtggaaggtctcattttattgagatttttaagatacatgcaaaggtttggaaatagaacctctaggcaccctcctcagtgtgggtgggctgagagttaaagacagtgtggctgcagtagcatagaggcgcctagaaattccacttgcaccgtagggcatgctgataccatcccaatagctgttgcccattgacctctagtggtgagtttctagaatactggtccattcatgagatattcaagattcaagagtattctcacttctgggttatcagcataaactggaatgtagtgtcagaggatactgtggcttgttttgtttatgtttttttttcttattcaagaaaaaagaccaaggaataacattctgtagttcctaaaaatactgacttttttcactactatacataaagggaaagttttattcttttatggaacacttcagctgtactcatgtattaaaataggaatgtgaatgctatatactctttttatatcaaaagtctcaagcacttatttttattctatgcattgtttgtcttttacataaataaaatgtttattagattg

SEQ ID NO: 5029 - DNA, 410 bp, Homo sapiens; identical to SEQ ID NO: 578

SEQ ID NO: 5030 - DNA, 218 bp, Homo sapiens
tttttttttttcttagcagacacaatgaatgaactgcaagcaaactaaaattctgttattaaaaaaaatcttttattaaaatgctcctggaaggagcaggtggtattgcatagtttgttcagatggcagtggtacacacacacatacacacacaagtggcctggagcaaaagtgcaaaatccgtagctggcctgtgggtcgggaagcctgtaggactg

SEQ ID NO: 5031 - DNA, 470 bp, Homo sapiens; identical to SEQ ID NO: 1385

SEQ ID NO: 5032 - DNA, 351 bp, Homo sapiens; identical to SEQ ID NO: 684
  misc_feature (1)..(351): n=a,t,g or c

SEQ ID NO: 5033 - DNA, 7787 bp, Homo sapiens
gaattcggggaacggtgtggagcggaggccgcggaggctcctcggtccttcagcacccctcggcccgacgcacccacgcccctcaccccccgagagccgaaaatggacccaagtggggtcaaagtgctggaaacagcagaggacatccaggagaggcggcagcaggtcctagaccgataccaccgcttcaaggaactctcaacccttaggcgtcagaagctggaagattcctatcgattccagttctttcaaagagatgctgaagagctggagaaatggatacaggaaaaacttcagattgcatctgatgagaattataaagacccaaccaacttgcagggaaagcttcagaagcatcaagcatttgaagctgaagtgcaggccaactcaggagccattgttaagctggatgaaactggaaacctgatgatctcagaagggcattttgcatctgaaaccatacggacccgtttgatggagctgcaccgccagtgggaattacttttggagaagatgcgagaaaaaggaatcaaattgctgcaggcccagaacttggtgcagtacttacgagaatgtgaggacgtgatggactggatcaatgacaaggaagcaattgttacttctgaagagctgggccaggatctggagcatgtagaggttttacagaagaaatttgaagagtttcaaacagatatggctgctcatgaagaaagagttaatgaagtgaaccagtttgctgccaaactcatacaggagcagcaccctgaggaggaactgatcaagactaagcaggatgaagtcaatgcagcctggcagcggctgaagggcctggctctgcagaggcaggggaagctctttggggcagcagaagttcagcgctttaacagggatgtggatgagactatcagttggattaaggaaaaggagcagttaatggcctctgatgattttggccgagacctggcaagtgttcaggctctgcttcggaagcacgagggtctggagagagatcttgctgctctagaagacaaggtcaaagccctgtgtgctgaggctgaccgcctgcaacagtcccaccctctgagtgcaacacagattcaagtgaagcgagaggaactgattacaaactgggagcagatccgcaccttggcggcagagagacatgcacggctcaatgattcatacaggcttcaacgcttccttgctgacttccgtgacctcaccagctgggtgactgagatgaaagccctcatcaatgcagatgagcttgccagtgatgtggctggggctgaagccctgctagatagacaccaagagcacaagggtgaaattgatgcccatgaagacagcttcaaatctgcagatgaatctggacaggcactgcttgctgctggtcactatgcctcagatgaagtgagggagaagctgaccgtcctttccgaggagagagcggcgctgctggagctgtgggagctgcgcaggcagcagtacgagcagtgcatggacctgcagctcttctaccgggacactgagcaggtggacaactggatgagcaagcaggaggcgttcctgttgaatgaagacttgggagatttcttggatagtgtggaagcgcttcttaagaagcacgaagactttgagaaatcccttagtgcccaggaggaaaagattacagcattagatgaatttgcaaccaagctaattcagaacaaccactatgcaatggaagatgtggccactcgccgagacgctctgttgagccgccgcaatgcccttcacgagagagccatgcgtcgccgggcccagctagccgattctttccatctgcagcagtttttccgtgattctgatgagctcaagagttgggtgaatgagaagatgaaaactgccacagatgaagcttataaagatccatccaacctacaaggaaaagtacagaagcatcaggcttttgaggctgagctctcagcaaaccagagccgaattgatgccttggagaaagctggccaaaagctgattgatgtcaaccactatgccaaggatgaagtggcagctcgtatgaatgaggtgatcagtttgtggaagaaactgctagaggccactgaactgaaaggaataaagcttcgtgaagccaaccagcaacagcaatttaatcgcaatgttgaggatattgaattgtggctatatgaagtagaaggtcacttggcttcggatgattacggcaaagatcttaccaatgtgcagaacctccagaagaaacatgccctgctagaggcagatgtggctgctcaccaggaccgaattgatggcgtcaccattcaggcccgccagttccaagatgctggccattttgatgcagaaaacatcaagaagaaacaggaagccctcgtggctcgctatgaggcactcaaggagcccatggttgcccggaagcagaagctggccgattctctgcggttgcagcagctcttccgggatgttgaggatgaggagacgtggattcgagagaaagagcccattgccgcatctaccaacagaggtaaggatttaattggggtccagaatctgctaaagaaacatcaagccttacaagcagaaattgctggacatgaaccacgcatcaaagcagttacacagaaggggaatgccatggtggaggaaggccattttgctgcagaggatgtgaaggccaagcttcacgagctgaaccaaaagtgggaggcactgaaagcaaaagcttcccagcgtcggcaggacctggaggactctctgcaggcccagcagtactttgctgatgctaacgaggctgaatcctggatgcgggagaaggaacccattgtgggcagcactgactatggcaaggacgaagactctgctgaggctctactgaagaaacacgaagctttgatgtcagatctcagtgcctacggcagcagcatccaggctttgcgagaacaagcacagtcctgccggcaacaagtggcccccacggatgatgagactgggaaggagctggtcttggctctctacgactatcaggagaagagtccccgagaggtcaccatgaagaagggagatatccttaccttactcaacagcaccaacaaggattggtggaaagtggaagtgaacgatcgtcagggttttgtgccggctgcgtacgtgaagaaattggaccccgcccagtcagcctcccgggagaatctcctggaggagcaaggcagcatagcactgcggcaggagcagattgacaatcagacacgcataactaaggaggccggcagtgtatctctgcgtatgaagcaggtggaagaactatatcattctctgctggaactgggtgagaagcgtaaaggcatgttggagaagagttgcaagaagtttatgttgttccgtgaagcgaatgaactacagcaatggatcaatgagaaggaagccgctctgacaagtgaggaggtcggagcagacttggagcaggttgaggtgctccagaagaagtttgatgacttccagaaggacctgaaggccaatgagtcacggttgaaggacattaacaaggtagctgaagacctggagtctgaaggtcttatggcagaggaggtgcaggctgtgcaacaacaggaagtgtatggcatgatgcccagggatgaaactgattccaagacagcctccccgtggaagtctgctcgtctgatggttcacaccgtggccacctttaattccatcaaggagctgaatgagcgctggcggtccctacagcagctggccgaggaacggagccagctcttgggcagcgcccatgaagtacagaggttccacagagatgctgatgaaaccaaagaatggattgaagagaagaatcaagctctaaacacagacaattatggacatgatctcgccagtgtccaggccctgcaacgcaagcatgagggcttcgagagggaccttgcggctctcggtgacaaggtaaactcccttggtgaaacagcagagcgcctgacccagtcccatcccgagtcagcagaagacctgcaggaaaagtgcacagagttaaaccaggcctggagcagcctggggaaacgtgcagatcagcgcaaggcaaagttgggtgactcccacgacctgcagcgcttccttagcgatttccgggacctcatgtcttggatcaatggaatacgggggttggtgtcctcagatgagctagccaaggatgtcaccggagctgaggcattgctggagcgacaccaggaacaccggacagaaatcgatgccagggctggcactttccaggcatttgagcagtttggacagcagctgttggctcacggacactatgccagccctgagatcaagcagaaacttgatattcttgaccaggagcgtgcagacctggagaaggcctgggttcagcgcaggatgatgctggatcagtgccttgaactgcagctgttccatcgggactgtgagcaagctgagaactggatggctgcccgggaggccttcttgaataccgaagacaaaggagactcactggacagcgtagaggctctgatcaaaaaacatgaagactttgacaaagcgattaacgtccaggaagagaagattgctgctctgcaggcctttgccgaccagctcatcgctgccggccattatgccaagggagacatttctagccggcgcaatgaggtcttggacaggtggcgacgtctgaaagcccagatgattgagaaaaggtcaaagctaggagaatctcaaaccctccaacagttcagccgggatgtggatgagattgaggcttggatcagtgaaaaattgcaaacagcgagtgatgagtcgtacaaggatcccaccaacatccagagcaagcaccagaagcaccaggcttttgaagcagagctgcatgccaacgctgaccggatccgtggggttatcgacatgggcaactccctcattgaacgtggagcctgtgccggcaatgaggatgctgtcaaggcccgcctggctgccttagctgaccagtggcaattcttggtgcaaaagtcagcggaaaagagccagaaactgaaagaagccaacaagcagcagaacttcaacacagggatcaaggacattgcattctggctgtctgaggtggaggccctgctggcatccgaagattatggcaaagacctggcttctgtgaacaacctgctgaaaaagcatcaactgctggaagcagatatatctgcccatgaggatcgcctgaaggacctgaacagccaggcagacagcctgatgaccagcagtgccttcgacacctcccaagtaaaggacaagagggacaccatcaacgggcgcttccagaagatcaagagcatggcggcctcccggcgagccaagctgaatgaatcccatcgcctgcaccagttcttccgggacatggatgacgaggagtcctggatcaaggagaagaagctgctggtgggctcagaggactacggccgggacctaactggcgtgcagaacctgaggaagaagcacaagcggctggaagcagaactggctgcgcatgagccggctattcagggtgtcctggacactggcaagaagctgtccgatgacaacaccatcgggaaagaggagatccagcagcggctggcgcagtttgtggagcactggaaagagctgaagcagctggcagctgcccggggtcagcggctggaagagtccttggaatatcagcagtttgtagccaatgtggaagaggaagaagcctggatcaatgagaaaatgaccctggtggccagcgaagattatggcgacactcttgccgccatccagggcttactgaagaaacatgaagcttttgagacagccttcaccgtccacaaggatcgcgtgaatgatgtctgcaccaatggacaagacctcattaagaagaacaatcaccatgaggagaacatctcttcaaagatgaagggcctgaacgggaaagtgtcagacctggagaaagctgcagcccagagaaaggcgaacgtggatgagaactcggccttccttcagttcaactggaaggcggacgtggtggagtcctggatcggtgaaaaggagaacagcttgaagacagatgattatggccgagacctgtcttctgtgcagacgctcctcaccaaacaggaaacttttgacgctgggctgcaggccttccagcaggaaggcattgccaacatcactgccctcaaagatcagcttctcgccgccaaacacgttcagtccaaggccatcgaggcccggcacgcctccctcatgaagaggtggagccagcttctggccaactcagccgcccgcaagaagaagcttctggaggctcagagtcacttccgcaaggtggaggacctcttcctgaccttcgccaaaaaggcttctgccttcaacagctggtttgaaaatgcagaggaggacttaacagaccccgtgcgctgcaactccttggaagaaatcaaagctttgcgcgaggcccacgacgccttccgctcctccctcagctctgcccaggctgacttcaaccagctggccgagctggaccgccagatcaagagcttccgcgtagcctccaacccctacacctggtttaccatggaggccctggaggagacctggaggaacctacagaaaatcatcaaggagagggagctggagctgcagaaggaacagcggcggcaggaggagaacgacaagctgcgccaggagtttgcccagcacgccaacgccttccaccagtggatccaagagaccaggacatacctcctcgatgggtcctgtatggtggaagagtcggggaccctcgaatcccagcttgaagctaccaaacgcaagcaccaggaaatccgagccatgagaagtcagctcaaaaagatcgaggacctgggggccgccatggaggaggccctcatcctggacaacaagtacacggagcacagcaccgtgggcctcgcccagcagtgggaccagctggaccagctgggcatgcgcatgcagcacaacctggagcagcagatccaggccaggaacacaacaggtgtgactgaggaggccctcaaagaattcagcatgatgtttaaacactttgacaaggacaagtctggcaggctgaaccatcaggatggcaaatcttgcctgcgctccctgggctatgacctgcccatggtggaggaaggggaacctgaccctgagttcgaggcaatcctggacacggtggatccgaacagagatggccatgtctccttgcaagaatacatggctttcatgatcagccgcgaaactgagaacgtcaagtccagcgaggagattgagagcgccttccgggccctcagctcagagggaaagccttacgtgaccaaggaggagctctaccagaacctgacccgggaacaagccgactactgcgtctcccacatgaagcccatcgtggacggcaagggccgcgagctccccaccgcgttcgactacgtggagttcacccgctcgcttttcgtgaactgagccactccctgggtcacccacccctcgctgcttgccctgcgtcgccttgctgcatgtccgctcctctgtgtgctctcactttccactgtaaccttaagcctgcttagcttggaataagacttaggagaaaatggtgcttcactaacccgcttccggtccagtcacaatcatcatgtcactgtgggacccagatctgtgtcttgaagcagctgccctcattccgacttcagaaaatcgaagcagctggcgcctccccttcggaattc

SEQ ID NO: 5034 - DNA, 359 bp, Homo sapiens
  misc_feature (1)..(359): n=a,t,g or c
gatctgttatnaaacgaaacaccccccgtgttaataacttggtatgaaatctgtttttatgagccgggccccctgtgcctctagtatacttgtattgactctcatagttacccttttagttttactgtgttctgtgaaaatttgtaattggttgngaatcactgtgggcgtccattcttattcaactaaatctccacaggttttttgagctggtgtggattagtttaactcttgtattcaaccattagtgctaccaccttctcacattacaatacanttnctggaagcaagtactgcatttcctatgcaacaaaaaaagggcaaaantacananattgctaaatgataaacaaanactt

SEQ ID NO: 5035 - DNA, 283 bp, Homo sapiens
aagttttccacaaacgtttatgtacacgccaatgtatgcatgagacatctttcaattaaaaatgtttaaactgatttttttttaaataccactataccaatgaggataagctgattttttaacttagattttatagctctagttttgcagttttggaaaatagcaggttttaaacaaaattaatatatgagctatttaaaatggtctttttagagtaagtcttacacataatggtcatttgctacttggattttcttgtccaattaatagtgacatttgacat

SEQ ID NO: 5036 - DNA, 437 bp, Homo sapiens
  misc_feature (1)..(437): n=a,t,g or c
aacaganttgaaatgtttggatttattgtagcattactatcaggaatacacattgattatggtattgctatcaagaatacatataaatacatgcctgaagctataagtgagataagagatattccagggttagtcaaaagttaatctttgagttccagaagtctggatgaaaatgagatgagactgcaaattttgttgttaggcagtcaccatttatgacccttggcagggagggcaggaatggtggttatattgtgaactgaatgaaaactgaggaactaatcagcatcatgtggggcctgaagcatttattgctacccagtgattaggttgtaaggcccttcgggacttatggtaacctggttaatggacctattacgttgcccgaattccctgcagccccgggggggtcccncctaggtttcttggagcggccc

SEQ ID NO: 5037 - DNA, 327 bp, Homo sapiens
  misc_feature (1)..(327): n=a,t,g or c
cagggtttggctttttattgacacaaatacacataggcagntnttggtaatggggaggtggggtacacaaaagcagaaatcgcacttcacacatttaggnctcanttagacaatgaggaggctgagcctgtccctccaccgcccattgcaatggttnnggcaataaccctccctaatcctggctcagtgagtagagggagtgaccggcccacccaggaggtcccccctttggttgcaatggcccaggtcctgaccatcccactctgtagtnccctgntccatctaccccacccatgtaaacagagttttgggctgcgttgtgataag

SEQ ID NO: 5038 - DNA, 632 bp, Homo sapiens
gtcccagggcggcctgaaggatgctgataaccgggagccccgccctgggttcggctatcccgggcaccccgggccggcggggcgaggctctccaattgctgggccagagcgggacccttcctttccgcaccctcctgggtatctccggtcttcaggcctccttcggagagccctgctccgagcccattgggcttccaatcttggcctgcctagcgccgagcagccaatcagaaggcagtcctcccgagggggcgggacgagggggtggtgctgattggctgagcctgaagtcgccacggactcggggcaacaggcagatttgcctgctgagggtggagacccacgagccgaggcctcctgcagtgttctgcacagcaaaccgcacgctatggctgacagccgggatcccgccagcgaccagatgcagcactggaaggagcagcgggccgcgcaggtacactctgtgctccccgagcgggcccgaaggtccgtttagaaagcgggggcgtcggcaagtaaaggcccggcttctcccggggcggcgcttggagggactgtaccgcggctcactgggcaggggggatccccttcggtgcagacggacttttacattcgccgaagcaggggagggg

SEQ ID NO: 5039 - DNA, 333 bp, Homo sapiens
cctgcatgtactgtatattacagatatttgtcatgctgggatttccaactcgaatctgtgtgaactttcattccttcagatttggcttgacaaaggcaggaggtacaaaagaagggctggtattgttctcacactggtctgctgtcgctctcagttctcgataggtcagagcagaggtggaaaacagcatgtacggattttcagttacttaatcaaactcaaatgtgagtgttttatcttttacctttcatacactagccttggcctcttcctcagccatagtgcatagctactaaatcagtgacctcgacatatcttagatgggagctcgga

SEQ ID NO: 5040 - DNA, 453 bp, Homo sapiens
gtcaaatctcatctctgttctcctagttttcacagaaatatttacaggaataaaggttgaaacaaaagtacctaatgatcatctccatccatcgaaagattgctcagggataagacactcaaacaagggcttgtgatgaggatggaaaagacaaagcaacttgaagagaaaaaaaaattcttttaaactcagttcatcctgcaaaatggacataacacatgcatataaaggtttgactttttaattccacttttttgcctgatcgcagggaagatggcatgtggctggccttcctgaagccttgctcctccaccactggctaacagacaggcctccaggtggccttgcaaggccgacagtgaccgcagcccattccccacatccttaatcagagcctcatgcagttcatccccacattaccccaacataacgtcgtagtgctacacgtagatg

SEQ ID NO: 5041 - DNA, 252 bp, Homo sapiens; identical to SEQ ID NO: 3909

SEQ ID NO: 5042 - DNA, 487 bp, Homo sapiens
tctcatggccagaattgaaaattttctcatccagaaatttagggcacccaattattgaatacccttatcatattgctttaaatgacagaaagattaaagctggcatcctctatagtatactaagcatgaatgtaaagtatgagaataaataggagactttcctaaatgtcaaattacaaaaccgctcaaaactttgtaattgtgactcatgcaaataccttgttaggtcaacttaatattacaaatactgcatcagctcggtgcctttatatcccttttcataaaaaagaaattctcactccactcctgaagccagcaaacagctctggaggaattacctgtacacccaagtgccacggtcactctggaattttaatacacacacacacacacccttactcatgaacatacacattttacaaacacacaatggtgtacacacacacacacacacatccacacacaccccatctttaggatttgtagc

SEQ ID NO: 5043 - DNA, 280 bp, Homo sapiens
ttttgccactgtaatcaaatcaatattttattcatacaggagtagaaaagtagaagacatgaacagaaataaaaattctgaccaaatcttaaggagtgtgaatgagaactgaatgtatgataaatgttgcatgttcagttcaatgggaaattgatcgcttatttaataagtgattgtggcacaaaggctgtcttcagcaaacaccaaataactctgtgctctgctttgagacacttttctgaatctgttagcaagagaaatgctgaagctttctcagatg

SEQ ID NO: 5044 - DNA, 209 bp, Homo sapiens; identical to SEQ ID NO: 3497
  misc_feature (1)..(209): n=a,t,g or c

SEQ ID NO: 5045 - DNA, 343 bp, Homo sapiens
aaatttataaggcaaactctttatataataaataggttacagggattcagtggggggggggtgtttttgaaacgtatacaggtacattcagacaggtttactgaaatggtacaaatttccttaataaattgccttttgtttttaaatatatcagtgctttcagtcatttggctatacacaaagaaccttttttctgaacactacaaaaaagcaatcaataatttttgtttttaaaacgacctacttattttctaaagtaattgtcccaaaacacaaaaactgaaggtgaatacgatacagggcttttagagacatctccagctaagtgtgtcccggcctctcc

SEQ ID NO: 5046 - DNA, 378 bp, Homo sapiens
  misc_feature (1)..(378): n=a,t,g or c
gtattttgctttattcaatctaataaacattttatttatgtaaaagacaaacaatgcatagaataaaaataagtgcttgagacttttgatataaaaagagtatatagcattcacattcctattttaatacatgagtacagctgaagtgttccataaangaataaaactttccctttatgtatagtagtgaaaaaagtcagtatttttaggaactacagaatgttattccttggtcttttttctngaataagaaaaaaaaaacataaacaaaacangccacagtatcctcngacactacattccaggtttatgcnggataacccagaagtgagaatactccnggaatctngggtatcncatgaatgggaccagnattcc

SEQ ID NO: 5047 - DNA, 452 bp, Homo sapiens
tgagacaaccagatgctgtaaaaaaaaaaacagcactgggatgtgttgaggagggggcagtttgctgtgctctgttctgtctgctgctctctctgggggccgcacaatgtccgcacacatcacggaggggagaaaggcatcagtaccaaacggaacaacctcttttttctacattgtccatacccggacatgtgaggctctattatcaacaggtggtgagaaaaattctgtttttattcgctttctggtaacttctgtaggccctggctcaaggacttagcatttcgtctcatgtacatctttttctgaagtgttctttgccatttctggaattgtccttggtttttccttagctcataggtcatagatgcagaaatatagtatttaaggcatccgcatccagcatcagatggctttgcatccagaaaaacattgataactcagtttgaagc

SEQ ID NO: 5048 - DNA, 418 bp, Homo sapiens
gttgtgttttttttgttttgtaaagctgcagcaatagatttattgcaaaggaactagacattacattaacctgatgaagatgtaacgatgcatgaagcataactggtgcaacattttttaaaaatcacaaatgaaaaagaaaattcattttcaaaagaaaatattgtatccaagtcagcttaatctctgaacaccataatataactcttaatgttgattctaaacatccaggataaagtttactttaaactgaataaaagaaagaaaaggtttctttccaaacttccccaacagattccttggctaccatcggtgcatcacacccataaagtaattgtcatcaacagaccgtaaaaagaaaaaaacccctcctacaaatagagaaattctcaggaaatccaagcaacaaatcaattag

SEQ ID NO: 5049 - DNA, 447 bp, Homo sapiens
tttttttttttcttttttttttctttttagtgtgtattaaaatgaatttatttacacagtaacatgatgccacggagtacacagcaaagtaccacagcaaaccaaagggtggcaccactgctggcagagaggacctttcaatgatagatttatacaactttacaatatgtaagtagaggggtgaagctccggaaagagcaaaaacaagattttcaaatacagagtgtgggcagggcagagagaattaaagagagattggaatgaggactgtcatgattcaaatcaccaagtagaatgaaatcttgcttctgtatttgcctcatgccaaaatgccctgcatatcctcaacagaaaatcccaacccagtgtgttcatacatcacactctttagttctaactggtaaaggaagggataaccaagtagtatttggagcaagttcctgaaac

SEQ ID NO: 5050 - DNA, 216 bp, Homo sapiens
tttttcatactcagtaagtgtttaatgaagaagagacagatggaaagagatgggcgaggaaggctgatgttacaaatataaactttgtcagcactttcaaaacaatagcaaatacacttaaatacatacaaagtttattaaaaataggttgcaactgaaatacagtagaaatggaaaactacagcagttttgatgttttctcatagtaatgcagtt

SEQ ID NO: 5051 - DNA, 439 bp, Homo sapiens; identical to SEQ ID NO: 676
  misc_feature (1)..(439): n=a,t,g or c

SEQ ID NO: 5052 - DNA, 367 bp, Homo sapiens
  misc_feature (1)..(367): n=a,t,g or c
ttttgatttaagaaatttattattttttttaaaaaagcaacttccagggttgtcattgtacaggttttgcccagtctcctatagcatggtattatgatcaggatattgaggacttgaatacgttgcactttataacaaacagacaaccagaaaaaagagttgatttaagaaatttattatttttttaaaaaaagcaacttccagggttgtcattgtacaggttttgcccagtctcctatagcatggtatagtgataactgattttttatnacaatgacccagaggcattgaagatccataactatcttcctgaattatcacagaaagaagaaagttagaagagtttaatggttaagtggtattaaaa

SEQ ID NO: 5053 - DNA, 234 bp, Homo sapiens
  misc_feature (1)..(234): n=a,t,g or c
cttattcaaaacaatattatttaatttaatattttcacctatgagaggtaatgaatgcagaaatatagtctccattatagcagacaggaaaaaatacattatcctactattttctagaaaaatgattgtggcattagcaaatcaaatggaaaaagtgaataagcagnctgngattacctgaaaatagttagttgctagtaaggttcagtacaatgtatgtttattaaataatcg

SEQ ID NO: 5054 - DNA, 426 bp, Homo sapiens
  misc_feature (1)..(426): n=a,t,g or c
gaggcaattatcaattgactttatttcctttcatatggtaacaccagcagtgtatgatatttgtaaataaaatacgtcataaaaaaatttaaccttattacctattatcagttaggttataccatcctgaataaaaaatatttgggccgggcatggtggctcacgcctgtaatcccagcactttgggagaccgaggggggcgattcacgaggtcaggagattgagaccttcctggctaacacggtgaaaccccgtctctactaaaaatacaaaaacaaaattagccaggcgtggtggcaggtacctgtagtcccagctgcttgggaagctgaggtgggagaatggcgtgaacccaggaggcggacttngcagtgagctgagattgtgccactgcactccagcctgggcaacagagcaagactccgg

SEQ ID NO: 5055 - DNA, 244 bp, Homo sapiens
atcttgatattgtttattgtttacggttatgacacattatatatatacacacacacacatatgtatatagttacgtacacacacaccaatggcactgattttggtacacatcagaattacttaagagagtttgttaaaaatggagattctggagccccactctgtgagtctggacgataggtcctacatttttaaatgcccctgcctgcccccaaggtgtttttatacagatggtagactcact

SEQ ID NO: 5056 - DNA, 399 bp, Homo sapiens
  misc_feature (1)..(399): n=a,t,g or c
ttttttaaaggtttgaacatcaaattttaatcttgaaaccttttatccagtcctcaaattattaacatgaaaaggagtgataaattgcaattttatcattaccatatcactgngtaacaagcccttgttacaaaatctccctctactgtctgcaaaaaaccaatagaaaacccatacattatattacctaatgntctattaacagatgaaattttaaccaactttataccaggaaactatgaacagaggtacttcaatcacatagcttaaaatatggagaaaagacaggtaaaaaaattatcttaacctgtagtagtcttttttctttttaaaatttttataaaatacactaatttcccaaaataaagantattatgncacattggngtaacttacacn

SEQ ID NO: 5057 - DNA, 6431 bp, Homo sapiens
  misc_feature (1)..(6431): n=a,t,g or c
aactgaattggcaaactagataccttcttgggttatggtatattagagaaacacgaaaactactggcatttggactttcttagaattttgtggctcattaaaaattgtatctggctcagtgtgatggagggttgggaccgggcagggtcttgctctgtcacccaggctggagtgcagtggtgcagtcatggctcgctgcagcctcgacttcccagctcaaacagttctgcatcagtctcccgagtagctgggactacaggcacacactaccatgcccggctaattttttttttaattttgtattttgtagagagggggtctcactatgtttgttgtccaggcttacgtgtgagttttaaataaaccatttctttttctttcagatttccacaagacggcaccctatgtcgtcactggcagcgtagatcaaacagtaaaagtgtgggagtgccgttgattgtgtctccttcggcccctcctccctcttttcctctggatgcactctgatgataccatggttaccccattgagctctgtttaaataaatattgtcctttcatgtaaattattctggatgtagattgagcttattaaatgttacacacaaagtattcatgcatggtgaatccaaattgtatactgtaaatttacatacgttgtctagaagtaccatagggtttaaaaacctgggctggcattggtcacaccaggcctaagaaggcagaagttgaatcaattgaactagggcactaaactgaatagttgacagtgtcattttatgttggattattaattcctgtttttctttctgctatctgttggtgcctgacttgatggcctcatttggggaaaagtggtggttattagggcttttcctgaaatgtgtatctatgtaacatcacttaagtgtgcttaataaatctcctgtaaggattttagatgataaggctacaattcagaatcttctgaaccatctatgtaatgaatggggattatacattggaatttttgtcatgacacatttgccaaatcagtaggatatatttgttttggcagcctatcacgcagaggctagtggtatatttatgtaagaaaatgactgtaaatctcaagaaaaatctcagcagctaatagcaactcatttatttcattttggtcttaatgctttgtaaacaggtcaaaaaatactgtcatactctaagcttctattttccacactggacatacttctagttgtattctccatactattagactgtgtagtgatgtgacttccaagtagaatttaatctccccattgagtgtgtcatggtacaaatcactattcgtttttggtgttttttagggatgtgcaatgtgcattacataatgacagaaatactgagaaggttctgtgtgcccatttgaaaggagtgggaggaatacagcagtttgtttttcaacatgaatctgatattgatttaaactgtgtttcacttacaagttttaaaaaaatgacagggtttaatggagcgtgcataaaaatgtactgttttcaccttttgtttatatgtaaatgtttgtaagtatatgggcctatctgtaagtgggtaagtctgtatgtgtgtatcatacacatcaacctccatgtccttagtcctgggtttttgaaaaagtgctaaaacggacaagtagaataaatgttgctgtggaatgccatgctttagaacaaaccctttttgatcttaatgcttctgaaaactaggtctgactctggggatttttttccagccgaaggaaaatcacttccgttatgtccccctctaatttagccgctcgacattttacacaacccggatatgttgtatattttgacccaaagttacaggtaggtttaagagaatttttagccatgacttttggagcactattccattgtcagttattaataaagaattccattgcttagctaaccaacaggttttttttgtttccaagagagttatttgaaaagttaacagaacaatgagataacagtgacagtttaacaaagataaaattctgaactgcgttttattcatttgtgtactatgtgattttttaaatgtcccctttagtatttaatggaaaattggttcctgcaaaagacaaagggtgagagttagcgtcctgtagatacacacagagactaggccgtatattaactagaagcagctttatgtctagcttgtgtctttttgtttgtttgcttgtttgtttttagattcctgagagatgtctctggaagggaaagttttgagaactaatggctatttttgaggacaaaaattacatcttaagctaattccttaaatacatacagtaggtgaattttcaggacaatattgcctcacaaccctgcttacattgaaaagtctttttcccttagctcttctgactggatttttctacaaaactatggaaaatatctttgttcttgtttgctgctattttctgtcctattttgagaaatataaatacatagaaatggtgcatcttaacatttgtttgtacatgtataaatgtcttgtattttaattcatttttagcatgaattgtttaagggtaagccacaacatctagaaatcactcatagatattgaacaataaaggagaatggtaccgatgcaggaggaagcaagcgtgtcttcccctgcagcacacagcgacttgcgttgacaaaggaggaggaaacgattactctgtaaacaaagttatccttacttgggagattgccacagcctgctgctgagttgagttaccagacatcctccatgtgagaagcagcgaacattgaatctcagggatggcccacaactgggtccacatgtaatgagccctgtttaataacgaaggggtgggggagagcagtccgtctacaacctggaatcagatttgcaaaatttcctgcactgctgtctgacactgtcctgttgatgccctttctgactgtgttctctgttttctctgtctgctgtctaaccctgtgccttgcctgggataaggacaatgatgaggttactggtttggattgtaagtagaggacttttattaattggtttagaggttcactgctgctttgtcactttctcaatcaaattggccacttaagaaataaagagctggtagaattgcatcctcagatgattattgactgtgtgtgtgtgtgaaaacagacattccagtgccacccaaatatatatctgtaacgtgcccaagaaatcctagctgcgctcttgagagtgcatgccatggagactggtttagacaccgcgtggagcctagttgcctgttgtcacggcatcttgcactttaggagactaagaccgtcctggttcgtctgtgtgtggtgtgaccaatggtgtgcccagagcactactctcaaaatcactagtgttagcaagtcgtcccgggctggggagcgttcgccgtagtctttggaagctttggctttagatttaccaagccccgcctccccgctgccagtgccctgctctcccgttcgcctctttctgtttctgtgtgaactttcccggtaatatcactcgttaaataggttttctttaaacttaattaaggaaaaactatttaaaggtaaaggatattttgttgacatcggtggctcgatcatccttaagcaactgaagttaaaattgttgaaggaaaaggcacttaaattggttactttcatgtccagctgtatataagtccagtgtgttcatctagatgacgcaaagaatctcctggtagagaagcgacatgtaaaaaactggtggaaaaaggttttggattttttttccagtggggtggggggagggcaagctggatttacaggtcacggctggactgaatgggcctttttatcttcccactgtatcatggaagtagctgcttgcttgtactgtccatccttcaggcatccctaaagctcactctgaagatgttagagacaaacacaaactcttcgagttaaagttgatcctgacactgacatgaaggcaagccttgatttcgtatgaacgttgctgaatggtaattgaggaaaacagttccccagattgttaagagttcactgaagatattgacacaattttaaaaaatcagtaaaggaatgtatataatattgctctcgtgttttacagtaagatttgttgctctcagactgtgtaaaacaaaatttattcatgttttctgcatattaaaaaatcttattgtaccaactggtaaactattaaatgcctataaaactagatgtgattttttttttttttttttttttttttttttttttgtcttcctttgcacaggggaaatgctgataaaaagtggggctgtgtgtagctccagtcacaaagagtgacacnaatcggtgtcagggcagtaaggcctcatgagctgctttccttcagggcagcacccgaactggctttgctgtcccccttcccccgggtggaggagggagtgcctcagcctgagccttgccatggcatgcgtctgcggcacaggcccgctctccccaaccctcccagcagcccgttctgactgtggctatcgctgtggccagagagccaaagccaggatggctggttacaggcccaagactagactcttggggacagagtctatagataaggggccctgccgggcgcggtggctcacgcctgtaatcccagctcttggggaggcagagacgggaggatagcttgagcccaggagttcgggacctccctgggcaatatagcgagaccccgttctccacaaaaaggaaaaaaaaaagatggggccctaccccctttgttctgttagcctctaatcttgctcagtggtcttggaatcataaaagtaaatccttaatactgttttcgattttggttgaaacatacaaaataagagtgttcatctttgtcccagaaaccccagctctgcactttacacatggctgtatctgtggtgtattcaaggtgccctacaaaggacagtttggtgatgtgctggttcctttcttacagcccagctgttttcctgcctcctattgggagtagtagcctgccccaaaataggagcttggcccagagcaaaaaaggaatgggccatgcgcagtggtacgcctgcaatcccagcaatttgggaggccgagacgggcagattgcctgagctcaggagtttgacaccagcctggacaatacagtgaaaccccgtctctactaaaaatacaaaaaaaattagccaggcgtggtagcaggtgcctgtagtcccagctacttgggaggctgaggcaggagaaacacttgaacctgggaggcggaggttgcactgggccangattgcaccactgcactccagcctgggcaatgaagcaagaccctggctcaaaaaagcaagaaaaaacaaagaaattggcctgaagttagttccctgcacttttgcagcttttccatttccttgcaagactcttccaggctgagatccagatgatagggccccaggggcagagttctagcgttagtatcactatctcagaaatgctgttagctgttcaaaacctggcaagtaactcgctggcttgtaactgcctcaaacctccttccaggagtcatgactgtgtatggcctttgatgcagggggagggtagctggctgtggcagctctgtccctgcctagcctggtgaaacctgacttgtgtgcagacggttcttaactgctgatacaccagaagctctaggacaggcatcctcaaagtgtgttccctggttcagcagagcagcagcacctgggagctcacgcctcagaacccctgagtggaagcggtgcagcctgcttgcttgcttgattcacaatctattataacaagcccttccaatgactgaggcaggctcaggttcgagaaccaccgagctaaatgattcaacttctcaccaaagaaacttgggcacatcactggtctcttggccccgcagctcaggtctggatcccgatctttcctctttcatccttttatttatttttattttttgagacagagtgtcactctgtcatccaggcttgagtgcagtgggatgatctcagctcactgcaatctcttcctcccaggttcaagcaattcttctgcctcagcctcccaagtggctgggattacaggcgcgtgccaccgtgcccggctaatttttgtatttttagtaaaaacagggtttcactatgttggccaggctggtcttgaactcctgaccttgtgatctgcccgcctcggcctcccaaagtgctgggattacatgtgtgagccaccgcgcccggcctatcctcactttgaacatgtggagtttgtccctttgtgacaatgtcctatgatcttcattcccacttggtcacctgaccttgactgactctgtctcaaaaataaaataatggcttactcc

SEQ ID NO: 5058 - DNA, 4778 bp, Homo sapiens
ggatcctccagcctgagtgctcttggggaaacatgctgtgtaaacactatgcccatttcctgcctggagcacaggttttgtggtagggctctcaggggtgaggaggaagcctggcagcccccacatctataaatgctgcgtctaccttaccctctgacttggaggcagagacccaagcagctggaggctctgtgtgtgggtgagtttagccccatcccctaggtgttctccagcttgaggatcgcaggcagagaggaccagcccagcagccacaggcctgaccaaagcccaggctgggaaggagggcaactccccattttccactgggaggtgtttcacagcacagtcaacataggtgacctgcaaagatcctcatgtttgttattttctttggccagatccatcctacagggttcagcagggcctacaggaggggcagtgagagaacagaccccaaaaagaaaggggactccatgactgaccaccttgaggggggccaggctgccgggccccgttcatcttttttcattctcaggtcgctgatttcttggagcctgaaaagaaagtaacacagcagggatgaggacagatggtgtgagtcagtgagtgagtgacctgactaatagcctgggagggacagggcaggttttctgcagaggcacggaagattcagctgaagtcagagaggtgaagccagtttcccagggtaacatagtgaggcactgaaagaaaggagactgcactggagcccaggtccccgggctccccagagctccttactcttcctcctcctcagcagcctggagaccccacaacctccagccggaggcctgaagcatgaggccatgccaggtgccaggtgatgctgggaattttcccgggagcttcgggtcttcccagcactctggtcgtcgcccgccctgcctcgtcgggctctgcccagcttcctgagtcctgacagagcacagtgggggagatgttggcagaggtggcagatgggctcacggccatccctcctgcaggagcagcgactggacccagagccatgtggctgtgccctctggccctcaacctcatcttgatggcagcctctggtgctgtgtgcgaagtgaaggacgtttgtgttggaagccctggtatccccggcactcctggatcccacggcctgccaggcaggcacgggagagatggtctcaaaggagacctgggccctccaggtactgtgctgcagaccccaccctcagctgaggacacagaccccttttcaggaggcccatctgtccaggcccctaggctgtgggccatagtgagctgggggctatagtaagctgggtgggacttcagtctgcagggctggtgggttcctggggcccttatgatggcgcatcctggagagtctgtcctcatagtgcccacggagtgatagagtgatagctgagccagccctggtgataatgggcatcgagtctcactagctccaaccagttgtgggtgacagatcctacacatccatgtctcttttctctgcaggccccatgggtccacctggagaaatgccatgtcctcctggaaatgatgggctgcctggagcccctggtatccctggagagtgtggagagaagggggagcctggcgagaggggccctccaggtgagcagggtggggcaggtgggcagtggaaacatgggcacagcgaccctgaagtcagttacacggggatgatggggatcagacaaaccctacaggttccccaagggcatttggctcaacctaagtaagagaggataagcttgagggagatagctgaggtgtctggggagtgtggtcacaattcagggaaaggcaggtgtgggaagtcctccgtgcctcatgaccaccgatggggacacactgagtcaggtgtgggatgagggacagcactgggaggcaggggaggcatgtcctgggatggaggccctggggctgtctgaagggtgaatgcggacgaggcatccagacagacggtgtgatcaggagccccacagacagaggggaactttgaagctcagagcggtaagcaagtccatcagggcagtgcagagagcatcatgcttgcccttcggtcggagggtgcgggagagggacttgccccacagaggcgggcagacagaacccctcgaggacaagagcaggaaagaggacaaggggtgggggtctcagcaggggcaaggcttcactaaagaataggggaccacgggtctgagacacactggaatcttgtggaccctctgagcctaggtctggtggcgcctaacagcaatgaaagggcagagttccaggattgcagatggcaaaacacctcgtggcagcaagtgggagtcttcactggcctgcccctccttctgtgtggggcactctccacagggcttcgagctcatctagatgaggagctccaagccacactccacgactttagacatcaaatcctgcagacaaggggaggtaaggggaccccctgggctcacggggtaggagtttcccacaaattcccctcattctcagcaccagcttctagaacatagagattacaaataggcatgcacatgcaggtcttggggaaaggaattgacgcttgcttttcttgatgtcttttgaatggcccagaggagacagaagcagacacaattcacttccccgatttcataggaaagcaagttctctatctgccttgctttccactgaattcacaggaaattgcaccatttctggcaataagtaattgttacttaggtgaatgaataaatggaggagagtctaaaagtgaatttagaaaactgcaattggaagaggaagagaagacacagagagaggcagagatggagagactggggagaatctggtagcagagaccccaggtgagggaggtggcttagagacaaagtggtcagtggcctgacccggactcctctgctctcagccctcagtctgcagggctccataatgacagtaggagagaaggtcttctccagcaatgggcagtccatcacttttgatgccattcaggaggcatgtgccagagcaggcggccgcattgctgtcccaaggaatccagaggaaaatgaggccattgcaagcttcgtgaagaagtacaacacatatgcctatgtaggcctgactgagggtcccagccctggagacttccgctactcagacggcacccctgtaaactacaccaactggtaccgaggggagcccgcaggtcggggaaaagagcagtgtgtggagatgtacacagatgggcagtggaatgacaggaactgcctgtactcccgactgaccatctgtgagttctgagaggcatttaggccatgggacagggaggacgctctccttgtcggcctccatcctgaggctccacttggtctgtgagatgctagaactccctttcaacagaattccacttgtggctattgggactggaggcacccttagccacttcattcctctgatgggccctgactcttccccataatcactcgaccagccttgacactccccttgcaaactctcccagcactgcaccccaggcagccactcttagccttggccttcgacatgagatggagccctccttattccccatctggtccagttccttcacttacagatggcagcagtgaggtcttggggtagaaggaccctccaaagtcacacaaagtgcctgcctcctggtcccctcagctctctctctgcaacccagtgccatcaggatgagcaatcctggccaagcataatgacagagagaggcagacttcggggaagccctgactgtgcagagctaaggacacagtggagattctctggcactctgaggtctctgtggcaggcctggtcaggctctccatgaggttagaaggccaggtagttgttccagcagggtggtggccaagccaaccccatgattgatgtgtacgattcactcctttgagtctttgaatggcaactcagccccctgacctgaagacagccagcctaggcctctaggtgacctagagccgccttcagatgtgacccgagtaactttcaactgatgaacaaatctgcaccctacttcagatttcagtgggcattcacatcacccccacaccactggctctgctttctcctttcattaatccattcacccagatatttcattaaaattatcacgtgccaggtcttaggatatgtcgtggggtgggcaaggtaatcagtgacagttgaagatttttttttcccagagcttatgtcttcatctgtgaaatgggaataagatacttgttgctgtcacagttattaccatccccccagctaccaaaattactaccagaactgttactatacacagaggctattgactgagcacctatcatttgccaagaaccttgacaagcacttctaatacagcatattatgtactattcaatcttcacacaatgtcacgggaccagtattgtttcctcattttttataaggacactgaagcttggaggagttaaatgttttgagtattattccagagagcaagtggcagaggctggatccaaacccatcttcctggacctgaagcttatgcttccagcctcccactcctgagctgaataaagatgatttaagcttaataaatcgtgaatgtgttcacatgagtttccatagctttggttccaagaaatatcacatttctgtatttttgtaaatcaaatgaactctgactctgagccccacttgcctgaagattggaaattcaatctcaggatgtg

SEQ ID NO: 5059 - DNA, 367 bp, Homo sapiens
tttgaggaatgagcaatttatttcaataaagagaaagcattaattttgctacagtgggaaaaaatgaactcaagagttgctacatttaactgtatccccatttatctctgcacgatgtcttatctcagtgtctcaattcacactaaaatattgaatgagaaatacaccacgttggctgattgcttgacatgtctgatttagggagacttctacaaccactcctctcttttttctcccagtaaatacttttgactttgacacctaccatattggaaatgacaggtgcccgagggcaagtgcatcaaagcagttaggattcgaatgcttgctaaggattatttttttaatggagcagttctattgaatc

SEQ ID NO: 5060 - DNA, 360 bp, Homo sapiens
gaggcttaaatgttactttaatagtatccacaaagaatctggtttagttattaaaatgacttatttttatttaaagaaaaaatctgtgattttactcattgtatatatagaagtgaatttttaaaaaatagtttcttcttttatgtggattctcttaagatttgaagaaccaaactattctttggttttattatacgggaaaaacaacacgcagtctagttaaacaactttgtgatatttatattccattgcacagatatgggttatacaaattagtaacacaagttatttcttaaattccaaacattttctaaaatattattacagcagatgcctaggatattaaaacataaaggtgga

SEQ ID NO: 5061 - DNA, 264 bp, Homo sapiens
  misc_feature (1)..(264): n=a,t,g or c
catcattctatttattacatgtatgaatattaacatctcatggtgtccatctaagtcaaaaccaacaaaagaaaaaagttaaccatatctcaagcaaacattcttacagattcccgttacttaaaatagaaatatgttcatctgcattaaatcatttgacaatttgaaaaagtctttaaaaaaaaaatcacctttaggtactttaaatatatttgttaattgttgangggcatcngtgtccagggttcagggattaaaccttgg

SEQ ID NO: 5062 - DNA, 460 bp, Homo sapiens; identical to SEQ ID NO: 634

SEQ ID NO: 5063 - DNA, 455 bp, Homo sapiens
cctttttctaatacttgcttatatcatgtgctgccgacgggaaggcgtggaaaagagaaacatgcaaacaccagacatccaactggtccatcacagtgctattcagaaatctaccaaggagcttcgagacatgtccaagaatagagagatagcatggcccctgtcaacgcttcctgtgttccaccctgtgactggggaaatcatacctcctttacacacagacaactatgatagcacaaacatgccattgatgcaaacgcagcagaacttgccacatcagactcagattccccaacagcagactacaggtaaatggtatccctgaagaaagaaaactgactgaagcaatgaatttataatcagacaatatagcagttacatcacatttcttttctcttccaataatgcatgagcttttctggcatatgttatgcatgttggcagtattaagtgta

SEQ ID NO: 5064 - DNA, 1098 bp, Homo sapiens
gagaagctctatctcccctccaggagcccagctatgaactccttctccacaagcgccttcggtccagttgccttctccctggggctgctcctggtgttgcctgctgccttccctgccccagtacccccaggagaagattccaaagatgtagccgccccacacagacagccactcacctcttcagaacgaattgacaaacaaattcggtacatcctcgacggcatctcagccctgagaaaggagacatgtaacaagagtaacatgtgtgaaagcagcaaagaggcactggcagaaaacaacctgaaccttccaaagatggctgaaaaagatggatgcttccaatctggattcaatgaggagacttgcctggtgaaaatcatcactggtcttttggagtttgaggtatacctagagtacctccagaacagatttgagagtagtgaggaacaagccagagctgtgcagatgagtacaaaagtcctgatccagttcctgcagaaaaaggcaaagaatctagatgcaataaccacccctgacccaaccacaaatgccagcctgctgacgaagctgcaggcacagaaccagtggctgcaggacatgacaactcatctcattctgcgcagctttaaggagttcctgcagtccagcctgagggctcttcggcaaatgtagcatgggcacctcagattgttgttgttaatgggcattccttcttctggtcagaaacctgtccactgggcacagaacttatgttgttctctatggagaactaaaagtatgagcgttaggacactattttaattatttttaatttattaatatttaaatatgtgaagctgagttaatttatgtaagtcatatttatattttaagaagtaccacttgaaacattttatgtattagttttgaaataataatggaaagtggctatgcagtttgaatatcctttgtttcagagccagatcatttcttggaaagtgtaggcttacctcaaataaatggctaacttatacatatttttaaagaaatatttatattgtatttatataatgtataaatggtttttataccaataaatggcattttaaaaaattcagc

SEQ ID NO: 5065 - DNA, 402 bp, Homo sapiens
tttttttttttttttttttttttctttaaagcactttattaatgaaagttggaaacctaaaaattgaacagtagtttaataaaatgtggcacatatgatggaatatcatgcagccattaagagatgtagaaatatacttgacacagcaagacagtcatggtattgttgagtgaaaaaaagttacaaaacagtatgtacactttgatcccattaaaaatatctataaatgcacagaaaagtctggaaggccatatacttaaataacagtggttctccctggatgatggaattatcagtgatttttctttctcactgaatcttttttctttttgccaacagggctatgacttgtattataaaaaagcattaacaattctttaaaaagtgtcctttgaagtaaga

SEQ ID NO: 5066 - DNA, 376 bp, Homo sapiens; identical to SEQ ID NO: 626

SEQ ID NO: 5067 - DNA, 269 bp, Homo sapiens; identical to SEQ ID NO: 66

SEQ ID NO: 5068 - DNA, 1206 bp, Homo sapiens
gcatgcaaccctctgcctccctcccacgttttccataatgattttatttatttatagctgacacaaggaagatggacccttctaaaccgtcttccaacgtggccggagtagtcatcattgtgatcctcctgattttaacgggtgctggccttgccgcctatttcttttataagaaaagacgtgtgcacctacctcaagagggcgcctttgaaaacactctgtattttaacagtcagtcaagcccaggaactagtgatatgaaagatctcgtgggcaatattgaacagaatgaacactcggtcatctagtacctcaatgcgattctgagatatttgaatttcataaaattgtaactgaaatttaaaatttttagttcaatgtgattgttttctttaaaatgagtactgaattgtactggtctgtccttttttcctttgcctaattgaagaaataattgcttgttttctagcctggcaagatattttcataaaagagggataacaatgctgattactaccttttaaaatattttagataaatgcacagcaccacagcaccacatctaagcattagtgatgggtagctgatgtcagcttcatgtggattttaagcactctagaaacaatgaagcttcttggcatattttaaggagctcccaaaatgtgttacctattaaattgtaactcagcaagtagaagaccatttgaaaagtcaggtacaaatttcctcaagtggcataaaaatgtagtcagttttctcttttaccagtttttatttccactccaattatttagaactttatttgtacatgtgcagaagaataaggcagctgagaatcttgtttcccccaagagagttttacaggctgagtgttgcaaatgtgttctttgtcctgttatatgtatatcaggaatacaaggatgtgaaataaaactgtaaatttgcataactggatgtacttagataatgtgaaataaacattaaagacaaggtctatttttaatagatttgcattttggtgatcttagtataaatttgcttttaaatgagatgtatttatccactcactttacactttaacttgacacttatgatattatttgtagagaaattctttaaatgaaactcatgaactattttgaaaaggagtgttgctaaaatgctgtgtgtaaaatgaattttttaccgtaatgattttgccagatc

SEQ ID NO: 5069 - DNA, 273 bp, Homo sapiens
tttgacatttataaatgaacctttattaaagacacttcaatgccatttgttagacacttcaatattttacatggttttcaatgtacactgtaccaaaatttctataaataaataactttgtacataaaagtaatactccctctttcacattgcctctcagaagcagcaaattcacatattttgtggaagtaagattagtcagttaactgtcaagaacaaaattctaaatgtgcttaccttttgaacagtgatgacacctgacagtaattgtta

SEQ ID NO: 5070 - DNA, 320 bp, Homo sapiens; identical to SEQ ID NO: 3360

SEQ ID NO: 5071 - DNA, 356 bp, Homo sapiens
tttaaatttcaaatatattttattcaaaattctccatttaggagaaaagatatataacaatgtttacacatgctttaataacttatttcactgtacaacttacattctgtataacagtacaataaaccagccaaagaaaataaccagttagcacttaaataagaatctaccatgtaaaaaacacagtatgggacactacaaggtagtatttatatattttttaaatgactgagctacagtacaacagtcatctagttcagtggttgtctaaaacatcaagctgtccacatctttctgattcatgatgggaaagctattatgacctttcacattcgaacatgtcattttgttgtgta

SEQ ID NO: 5072 - DNA, 293 bp, Homo sapiens
  misc_feature (1)..(293): n=a,t,g or c
ttttttttttgatgttttaatgttttattcatggtatgtaaagactgaagctgaatggctctttgctctacttttctattattacacttaacatttgtcattacttttggtgccagaacagttttcatggatggcagggaatatcctgaattggaaatnatatatatatatatatatgganacagaaatacaagaaaatatgcttgggggaaaaaaaacattgacaataaaacaactgcttctttaaaagtagtattaataaaggcttcaaaactccaaagtaattttctggt

SEQ ID NO: 5073 - DNA, 299 bp, Homo sapiens; identical to SEQ ID NO: 589
  misc_feature (1)..(299): n=a,t,g or c

SEQ ID NO: 5074 - DNA, 331 bp, Homo sapiens
ttttttttttgtaaagacagatatatttatttcatatgacagcacgtttcacaggatatgtacagaatgtctgtgtaccactgactttaatactgtacttctataaagtttatagttataaatattgtatgccacataagcaataaaattcttacatataaacagcaatctaatatagagaacacagagttcacaaagagatccttagtgtctaacttctgctctgcttttaacagaactagtaaatatttaataatacatagggtaatggctagttatttgcagcatacctttaactttcataactttgtgcattttcagcaacttgccc

SEQ ID NO: 5075 - DNA, 577 bp, Homo sapiens
taagagaaagaaaaatcaaatatttattaaaagtaccataatacagacccatttcaagtaaggacaaacacaccaacatatttcttagtagtttcctcacaatagattattaaagcatagaacaattattcatattcataaagaaatgacttcaaaataggttaaattgttttccatctactctgtttaataaggcaagaacaaatgattcactttagacaaatagtctcatcaaaaaagggctaaaatagtaaagattcatcacctaaagtggtaagctttggatatctgaaatataaacatgttagtactctgatgatcgccagataaatgaatttaggcaagaaaacacattgttacaaaaagcctgggttctaaatcaggattactgagacactaacaatttcagatttttgccttcattccaagaagcaccaacccagttttctttagactggcctgggctgggtttggggccaagatctagtccaaatggtagtctgccagtggatgtaggtaaataagatagagggatgaagaaaaatttagcatcccgccagctgaatatcgggttcgc

SEQ ID NO: 5076 - DNA, 433 bp, Homo sapiens
  misc_feature (1)..(433): n=a,t,g or c
cacaaaaatttcttttaatgaataaataatttgatgaaatcaaaaatatttacaatataaacacatggaaacaatacaaatctgacagaaacgacgactcatacaacatatctttgttcattacacatttatctgttagtcctggaaagctacataagcatatattatgcaacatgttaaagtacaaatattacctaaaataatatattaccataatgccagatagcattctccacagaacaaaaacatacactcagctgtaacaataacgagggtcacgggccacaaaataataccccaaaggtacaaattccttcataagaatatagttgtgctcttcagtttaccagctggtctacggctgctctaggaagccgggtgggaaggagtacnggatttgggcactgtggctggtgtggtgnggtttcnggaa

SEQ ID NO: 5077 - DNA, 384 bp, Homo sapiens; identical to SEQ ID NO: 1706

SEQ ID NO: 5078 - DNA, 207 bp, Homo sapiens; identical to SEQ ID NO: 376

SEQ ID NO: 5079 - DNA, 435 bp, Homo sapiens
ttcaggtcgtaagccactttattccagtcccttgaacatcacaggctggttttatttgggacagaacaggttttatttccaaaggtccctgaacacagcaatgacaatgaacagcccagcagaggagtgacataaaccttgaggcatgcagtcttctgggtgctgtggagtcccttggccaaacttgagtgcactggattcgacatacaaagaccttcctgggaaggagaaggagaaaaacaacctccgagaaaatacagacagggtcagtggcaggccaggacagggactatttctatacattctggaagtgtcggcattcatcagcctgcatgtggctcacttttctttctggaatagccggagacctctactcctcactccagctctaggttccaaggaacagagtgggtctggctcagcgagatgtcatga

SEQ ID NO: 5080 - DNA, 352 bp, Homo sapiens; identical to SEQ ID NO: 658
  misc_feature (1)..(352): n=a,t,g or c

SEQ ID NO: 5081 - DNA, 422 bp, Homo sapiens
tttctttgtattataaactgacttttaataataataaaaaatctatcaagaatttaacgagaagaatctgtacattttaaagtaaaccagtgcacaatgcgctggccctgggcctcccccatttcccgcagcagggctaaagcgggtcctcctttgtctctgatgcaagatacagtgacaaggccactgtcctgccctcgtgtatgctgcggcaagagagggaagcgcaccctggcttgcgggaggctcggatgccagatgccgggaggcttcaagctcccaggcctgggggcagcagggagccccacctgaactcaccacctgccaggggtgacaggcgtccccccgcttcctccccagctgtgacctttccctgaaggcataccgaagctggggggacaaactgccgagggggcttgtgt

SEQ ID NO: 5082 - DNA, 427 bp, Homo sapiens; identical to SEQ ID NO: 3387

SEQ ID NO: 5083 - DNA, 1603 bp, Homo sapiens
ggccagggatcaggcagcggctcaggcgaccctgagtgtgcccccaccccgccatggcccggctgctgcaggcgtcctgcctgctttccctgctcctggccggcttcgtctcgcagagccggggacaagagaagtcgaagatggactgccatggtggcataagtggcaccatttacgagtacggagccctcaccattgatggggaggagtacatccccttcaagcagtatgctggcaaatacgtcctctttgtcaacgtggccagctactgaggcctgacgggccagtacattgaactgaatgcactacaggaagagcttgcaccattcggtctggtcattctgggctttccctgcaaccaatttggaaaacaggaaccaggagagaactcagagatccttcctaccctcaagtatgtccgaccaggtggaggctttgtccctaatttccagctctttgagaaaggggatgtcaatggagagaaagagcagaaattctacactttcctaaagaactcctgtcctcccacctcggagctcctgggtacatctgaccgcctcttctgggaacccatgaaggttcacgacatccgctggaactttgagaagttcctggtggggccagatggtatacccatcatgcgctggcaccaccggaccacggtcagcaacgtcaagatggacatcctgtcctacatgaggcggcaggcagccctgggggtcaagaggaagtaactgaaggccgtctcatcccatgtccaccatgtaggggagggactttgttcaggaagaaatccgtgtctccaaccacactatctacccatcacagacccctttcctatcactcaaggccccagcctggcacaaatggatgcatacagttctgtgtactgccaggcatgtgggtgtgggtgcatgtgggtgtttacacacatgcctacaggtatgcgtgattgtgtgtgtgtgcatgggtgtacagccacgtgtcctacctatgtgtctttctgggaatgtgtaccatctgtgtgcctgcagctgtgtagtgctggacagtgacaaccctttctctccagttctccactccaatgataatagttcacttacacctaaacccaaaggaaaaaccagctctaggtccaattgttctgctctaactgatacctcaaccttggggccagcatctcccactgcctccaaatattagtaactatgactgacgtccccagaagtttctgggtctaccacactccccaaccccccactcctacttcctgaagggccctcccaaggctacatccccaccccacagttctccctgagagagatcaacctccctagatcaaccaaggcagatgtgacaagcaagggccacggaccccataggcaggggtggcgtcttcatgagggaggggcccaaagcccttgtgggcggacctcccctgagcctgtctgaggggccagcccttagtgcattcaggctaaggcccctgggcagggatgccaccctgctccttcggaggacgtgccctcacccctcactggtccactggcttgagactcaccccgtctgcccagtaaaagcctttctgcagcaaaaaaccccc

SEQ ID NO: 5084 - DNA, 349 bp, Homo sapiens
ttttttttttttactcattacacatttattgtacattttcacaatctggatgcgccacagaattgggggcatggggtgggggaagaggggggcaggggacactgggataatatggggggtctaaaacacagcacccccacctccagcatctctcctaccctttcacaccacagcttagatatccctgctccccctccacacagaaaaccagaagtctggggggaagaaagtttgggggccccctcccgtggcaggttaagggactgtaccctcaaacccttaaaattgtgccatttaaaaagacaatagacccttcctcaatcagttcacccaatgagaggacagctct

SEQ ID NO: 5085 - DNA, 451 bp, Homo sapiens
cctgtttgctatcctttattaaagggcccacatcctcatgggactccagccaaaccagtcaggtcccccaaatatagcaggaggcctggaaggggaggggaatgacttatgatcctaccatgcctcccaagaaacagaaaccaccacagacagacagacagacggacaggggctggggagaacttgcctcactctcagtcctctcccactttcccccacttgaaaagaaagtcaaacactggctacgagcaccccagccccccaccccacccatagcagcgtttgtgggacacaccccctttgcaaggggtggccccgaggcagcttcctatctctctcttcactttggtttgctcctggcaactccgtgccctcttcctttcctcagcctccggttcggtctcccccttgtcttctatcacctactcggaccttctctctcatctcctgg

SEQ ID NO: 5086 - DNA, 426 bp, Homo sapiens
aagagaatttaaaatcatatttattgttttgcaaacaataacttagacatttcttaatattttaaaaaccccaacacaaagtaataaatttggcttcttttccccacaaaaatgggaaatacctttcagtaaaggaaattttaaattatttttacacaccagttggttgttggaatttatagctctttaacatatgacatcagcaaaaataattagcattaactgattaatacataaaacaatttacaatcatatggtaagcaggaaacaaaaaccgatcagaaaacaccgttttatagtaattttcaaacagataaattattacagtatactttatccccaacatctctgagcccattaacagagtacttctatacatataaagatataataaaaggatacggtatttattggcaacagcaaatt

SEQ ID NO: 5087 - DNA, 299 bp, Homo sapiens
  misc_feature (1)..(299): n=a,t,g or c
aatggtcagcaatgtctttttaatacagatgtggtacagaatgtttaattacagcagggcagtgattccagttaaataaaattaaaaacctttattttcccaaatataaaattactaaattaaagtcttaaaagaaaatataacatggtgacagctttaaagtacaccaccattcaccacaggntttatgatttaccaattacatactccaccattttggcaaaaggatgaaattcttaaaactgtttataaacctaatatagtaaagactgtatacatctccatattgcacattttta

SEQ ID NO: 5088 - DNA, 466 bp, Homo sapiens; identical to SEQ ID NO: 3325

SEQ ID NO: 5089 - DNA, 479 bp, Homo sapiens; identical to SEQ ID NO: 562
  misc_feature (1)..(479): n=a,t,g or c

SEQ ID NO: 5090 - DNA, 441 bp, Homo sapiens
  misc_feature (1)..(441): n=a,t,g or c
cctggtgcagccagatgttctaacttttgaacaaatgagcgtggtcagtaatgtacaataactcttgagtctgttactttggcctagctaagcccatctggccctcggnatncctgcaagatgacagacagaagagcaagggcactatcagaaatcggaacaggctgccccctactcctcccagcctctaccagtacacagagacagactggagatagagcattcgcagccagttggatcttggttcttttgtcttctgaaaataaaaataagtgcttgtcttgtctttggaggtcaaagagaaccgcactaatttatttcctcgagggggcttttctggaggagaggatcctcagtcctgtgccaaggtttcacgctgtttggccacacgccaggcctttcttctggatctggtctgcacgtccagagatgatggaggaa

SEQ ID NO: 5091 - DNA, 376 bp, Homo sapiens
  misc_feature (1)..(376): n=a,t,g or c
ttcaattttccacatataaaaatatattttttattgcaatactgaacagttaaggccacaacactttagggagaatttgagatacacatattttgaaatgacttgttaaaaatattagcataaataaatatcaaaactggtcacacttatagaagctgaataaaacanattaanncnntnatcnctttaanngactactatcaganactttactncanangttanaacatttctcangtatacattacaactacacttggtgactgtgaaaacataaatatatatttatagtattgtacagggattttgatcttctctctgtatttgttggtgggatattctgatgattctgactcatggtggttctgggtcggca

SEQ ID NO: 5092 - DNA, 423 bp, Homo sapiens
tttttttttttttattaggaatttagcttttattcaaaattaaataagcaaaagcaaaaattttaagaaacttttacaaattacttacataaaagaaagttaataaggacagtcacaaatttgcaacaaataattacaaaagtttctagggcagcatgaatataaaccatgttgcagcatggtgatctaactgtgatatgaataaggcataactaacatttgcaccgagaccagaattaaaaacaaaaacaaactttaaaagcttagttctatattaaacttcttctcttttcccagatccttaatgggtttatactatgcatttttttttaaaacaaacacatcatgtcaaactataaattacacaaatgggcagttaatgtgaaaagccccctaaaatgtacaaactaactggtactgaat

SEQ ID NO: 5093 - DNA, 200 bp, Homo sapiens
attttttcctaaggataaagtacctttgagcatgagtgtatcacagctttcattaggaaaacttttcattacatacttgtttaaactctgtcttccagggtaaaaataataaggttgaatcattttattaaaaatactttttaagaaaataactatgaacatctgaatattaaagatataaaaatggcacataattcata

SEQ ID NO: 5094 - DNA, 521 bp, Homo sapiens; identical to SEQ ID NO: 635

SEQ ID NO: 5095 - DNA, 425 bp, Homo sapiens; identical to SEQ ID NO: 291

SEQ ID NO: 5096 - DNA, 427 bp, Homo sapiens
  misc_feature (1)..(427): n=a,t,g or c
aaaaacagaagcgcgaccatttctttattaaattatacaaaattgttnnngaggggggcagctgtggggctcngcaaccccggccccaccccggcctggcgctgtctgagaagaggggatctgagggagatccagggatcaggcaggatagggatggggcaggacatgaggctgggggatgcagaggttaggtgggagaggctaccggagaagaatgaggctggtaggggagggagaaagagagcaaagagagagaggagcaattgggggccagctggagagctcanatggagcaggtcaggaggtgnaacaattngcagagtnatgggtggagggcgcagtgtctnggagagggcggaaattagaaggctggtgagaaagaagagggtggcagctctggttgctagctctctcctcgtgccgaatg

SEQ ID NO: 5097 - DNA, 1098 bp, Homo sapiens; identical to SEQ ID NO: 5064

SEQ ID NO: 5098 - DNA, 578 bp, Homo sapiens
  misc_feature (1)..(578): n=a,t,g or c
ttttttttcttatacaaagataattttattaatgaaaagatcacacaaaacaaagtttttgtattcaaagttgtctgtttaaaatgtggaaaaggtaatatttacaacatttcccatacagtacatagtttttgtgccttaacagaatgctaaatagagaaaaaaaccaaaagcaaatgctaaattgagagaaaatcaaaagcatcagaaaatcttgcccaaagaataatacttaataggaaacaaaattaagaaaactccttaatattttaaagtatgttgtataaaaacgttgtgtcttgtttattaagactaccttttttccatttgattggcactaatatcgctatcacactttttaatgttcagcaaaatcctagtgagctgccgaaatgaattctacaaaatgtctgagaaaggtactgtataatacaaaatgtaatattctaaatgttaaaaaacnaaagttaaaacnaaaaatataagccactgtaagtgggttataataccatccatgggtgggcctggaaccnttaaaaaaggggagtccattgcncttggccctaatataccaagng

SEQ ID NO: 5099 - DNA, 616 bp, Homo sapiens
  misc_feature (1)..(616): n=a,t,g or c
agagagatgaagacacacgtttagtattttattatgaatcattatttcaaagtcccatactgcatattcatataaggcaacacggcacaatttcaggcttcatcacaaaggatgaaaaagactgtttctaactccctcctaatttgcagacatgcttgaacacttaatggaaggtgaagtttattttgtggcccctcagttctctttcaagtcctctagtagaaagtctccatggtgtgatcttctgactgggtagaacccgcaattctctgctgtttttagtctttgttccagatgactaattacatgacttggctgcatttgtgaggggccgacaccaacacaattaaaccagtgcaccattcagggccatagggtaggaggcaccagggttcaagaaggaacttggcgtgttgtaggatctgagttggggcggctctattccggctatccatcgatctcctcttcctcatcctcaaaagcttcctccccgtcattggcggtggcatcctggtactgctggtactcggataccaggtcgttcatgttgctctccgcctcngtgaactccattcatccatgncctcanccgtgaaccagtgcaggaaggcctggc

SEQ ID NO: 5100 - DNA, 406 bp, Homo sapiens; identical to SEQ ID NO: 294

SEQ ID NO: 5101 - DNA, 359 bp, Homo sapiens
  misc_feature (1)..(359): n=a,t,g or c
actttagagatcatacctactttcctgcctttttgataagtaaggcatgaaatgaaacaaaagttttgagctgtaaggtgcctataaaggatgtcactacagcattcacaatgctaggtgtgtaagatgacatggctgttaccatgtactaaagaaccccatcatgtgagagatcgctcaaagtcattaacacaaagcagtgaaaatcatccagcaaagcagtgcttatgagagactagaattcagagaaatgcaaggtacgaacttctctctaatccaagggtattctgctgtgatcttctaatcagtgatgattggtgcttatgcacaccgacatcttcatgggagangaccaggct

SEQ ID NO: 5102 - DNA, 383 bp, Homo sapiens; identical to SEQ ID NO: 2815

SEQ ID NO: 5103 - DNA, 408 bp, Homo sapiens
  misc_feature (1)..(408): n=a,t,g or c
ttttttaattttcaaangactgttgatgtcactgtggtttattaggtaaatacaaagtataggctcttgcattttttaaaaagcaaaaccaaagagattagaaaccaagtacacatatcctctttagaagagaaacataaatcagttttaacaattaggcacttaaaaatgtaaatgtaagacaacattatagaagtataaactatagttacactcctaaattcctcctgaaatgtttacaaacacaaaatcacaagcatggaaaacaaatttcctctttatcaaaaaaggaacctgaatttgaatcccatgtgataaaccnatgattaaggtactgggtgggtaggggaaaaagggcttctggaaattttacntatttgntttaaaatgttaggcttttcntaaaac

SEQ ID NO: 5104 - DNA, 446 bp, Homo sapiens
atgttagaaaattttaatatatgattttggtagggccaatacatagtaaagacatagctttatttcaattgaaccgaataaaatgatgtatttcagtaaattaaggcaaaggagatagatgctatgaccagtggtgcaaaatttttcaaaaatttatacattagatttacctttacaaggttatagtcaagaataattaatttgtattttaagcaaactctactgcttttcaaaaaatgtcttaatcttgagtgaggaatagtgaaggtaatcttaatatactgtttaactttaaaaaataattttagaattatagaaaagtttcaaaaagagtatagaatttatgcacacccttctgccagctttccttaatgttaacaatgtacataaccataatatgattttccaaaaccaggaaattaacattacagtagtgttttaatttt

SEQ ID NO: 5105 - DNA, 202 bp, Homo sapiens
  misc_feature (1)..(202): n=a,t,g or c
attcatggtcgantattatttattgtcagaaaggtacagcattcacaccaatatcagacaaaatagattttaactaaaaaattatttcgngacaaaaataacaatatatgtnaataaaaggctcaattaaaaatgtataacaattataaacacatacacatcaaacaacagtnccccaaaatacataaagcaaacattgaca

SEQ ID NO: 5106 - DNA, 4732 bp, Homo sapiens
tccagcctgagtgttctgcagggaaatgtgctgtgtaaacactatgcctatttcctgcttggagaacaggttttgaggtagagctctcaggggtggggaagaagcctggcagcccacatgctataaatgctgttgtccacctttatgctctaacttggaggcagagacccaagcagctggaggctctgtgtgtgggtgagtttagccacatcccctaggtgttctccagcttgaggatcgcaggcagagaggaccagcccagcagccacaggcctgaccaaggccaggttgggaaggagggcaactccccattttccactgggaggtgtttcacagcatggtcaacatggatgacctacaaagaccctcatgctttgatatcttccttggccagatccatccctaccagggactcagcagggcctaagcagggggagtgggagaacagaccccaagaggaaggaagacctcatcactgactgtgagagggtcatcaccccccgatgatcaccttgaagggtccaggctgtgggccctattcatctcttttcattctcaggtcgctgatttcttggagcctgaaaagaaggtaactgggcatatgagggacagatggagtgagtcagtgagtgagtgacctcatccttcctcctaacagcctgggagggacagggcaggttttctgcagagcatggaagattcagctgaaatcagagaggtgaagccagtttcccagggtaacatagtgaggcactgaaagaaaggagactgcactgagcccaggtccctgggctccccagagctccttactcttcctcctcctcagcagccttgagaccccacaacctccagccggaggcctgaagcatgaggccatgccaggtgccagatgatgcttggaattttcccgggtgcttcgggtcttcccagcactctggtctcgcccgccctgcctctcgctctgcccagcttcctgagtcctgacagagcacagtgggggaagatgttggcagaggtggcagatgggctcacggccatccctccagcaggagcagcgactggacccagagccatgtggctgtgccctctggccctcaacctcatcttgatggcagcctctggtgctgcgtgcgaagtgaaggacgtttgtgttggaagccctggtatccccggcactcctggatcccacggcctgccaggcagggacgggagagatggtgtcaaaggagaccctggccctccaggtactgtgctgcagaccccaccctcagctgagggacacagaccccttttcaggaggcccatctgtccaggcccctaggctgtgggccatagtgagctgggggctatagtaagctgggtgggacttcagtctgcagggctggtgggttcctggggcccttatgatggcgcatcctggagagtctgtcctcatagtgcccacggagtgatagctgagccagccccggtgataatgggcatcgagtctcattagctccaaccagttgtgggtgacagatcctacacatccatgtctcttttctctgcaggccccatgggtccgcctggagaaacaccatgtcctcctgggaataatgggctgcctggagcccctggtgtccctggagagcgtggagagaagggggaggctggcgagagaggccctccaggtgagcagggcgggcaggtgggcagtggaaacatgggcacagcgacctgaagtcagttacacaggggtgatgggggtcagacaaaccctgcaggtaccccaagggcatttggctcaacctaagtaagagaatatgaatttgagggagaaagccgaggtgtctggggagtgtggtcacaattcagagaagggcaggtgtgggaagtcctccgtgcctcatgaccgctgatggggacacactgagtcaggtgtgggacgagggacagctctgggaggcaggggaggcatgtcctgggatggagccctgggggcagtctgaagggtgaatgcggacgaggcatccaggcagatggtgtgatcaggagccccacagacagaggggaactttgaagctcagagcggtaagcaagtccatcagggcagtgcagagagcatcatgcttgcccttggtggagggtgcgggagagggacttgccccacagaggcgggcagacagaacccctcgagggacagagcaggaaagaggacaaggggtgggggtctcagcaggggcaaggcttcactaaagaataggggaccacggggtgtggagacacactggaatctcgtggaccctctgagcctagggtctgggtggtgcctaacagcaatgaaagggcagagttccaggattgcagatggcaaaacgcctgcgtggcagcaagtgggagtcttcactggcctgcccctccttctgtgtggggcactctccacagggcttccagctcatctagatgaggagctccaagccacactccacgacttcagacatcaaatcctgcagacaaggggaggtaaggggaccccctgggcctcacggggtaggagtttcccacaaattcccctcattctcagcaccaccttctagaatagagatgacaaacaagcgtgcacatgcaggtgttggggaaaggaatgatgcttgcttttctgatgtctttgaatggccaagaggagacaagcagacacaattcactccccatttcataagaaagcaagttctctgcctgtcttgctttccactgaatcctaggaaattgcaccatttctggcaataagtaattgttacttagatgaatgaataaatggaggagagtctaaaagtgaatttagaaaactgcaattggaagaggaagagaagacacagagagaggcagagatggagagactggggaggatctggtagcagagaccctaggtgagggaggtggcttagagacaaagtggtcagtggcctgacctggactcctctgctctcagccctcagtctgcagggctccataatgacagtaggagagaaggtcttctccagcaatgggcagtccatcacttttgatgccattcaggaggcatgtgccagagcaggcggccgcattgctgtcccaaggaatccagaggaaaatgaggccattgcaagcttcgtgaagaagtacaacacatatgcctatgtaggcctgactgagggtcccagccctggagacttccgctactcagatgggacccctgtaaactacaccaactggtaccgaggggagcctgcaggtcggggaaaagagcagtgtgtggagatgtacacagatgggcagtggaatgacaggaactgcctgtactcccgactgaccatctgtgatttctgagaggcatttaggccatgggacagggaggatcctgtctggccttcagtttccatccccaggatccacttggtctgtgagatgctagaactccctttcaacagaattcacttgtggctattagagctggaggcacccttagccacttcattcccctgatgggccctgactcttccccataatcactgaccagccttgacactccccttgcaaaccatcccagcactgcaccccaggcagccactcctagccttggcctttggcatgagatggaggcttccttattccccatctggtccagttccttcacttacagatggcagcagtgaggccttggggtagaaggatcctccaaagtcacacagagtgcctgcctcctggtcccctcagctctgcctctgcagcccactgcctgcccagagccatcaggatgagcagtaccggccaagcataatgacagagagaggcagatttcagggaagccctgactgtgtggagctaaggacacagtggagattctctggcactctgaggtctctgtggcaggcctggtcaggctctccaggtggtcagagggcccagtggtgccccagcacggtggtgcccaagccaaccctgtgactgacatgtacgattcactcctttgagtctttggatgccaactcagccccctgacctggaggcagccggccaaggcctctagggaagagccccccactgcagacatgacccgagtaactttctgctgatgaacaaatctgcaccccacttcagacctcggtgggcattcacaccaccccccatgccaccggctccactttccccttttattaatacattcacccagataatcattaaaattaacatgtgccaggtcttaggatgtgtcttggggtgggcacagtacccggtgactcttggggatatttatttattttccctgagcctatatcttcatctgtgaaatggggataaaaatacttgttgctgtcacaattattaccatctctccagctagcaaaattactaccagagccgttactacacacaaaggctattgaccgagcacataccatgtgccacacaccttgacaaaatcttttaatacagtttattatgtactattcaatctttacacaatgtcacgggaccagtattgtttacccaattttttataaggacactgaagcttagaggagtgaaatgttttgagtgttatttcagagagcaaatggcaaagactggatccaaacccatcttcctggacctgaagttcatgctcccagccaccccacccctgagctgaataaagatgatttaagcataataaatcgttagtgtgttcacatgagtttccatagctttggttccaagaaacatcacatttctg

SEQ ID NO: 5107 - DNA, 386 bp, Homo sapiens; identical to SEQ ID NO: 637

SEQ ID NO: 5108 - DNA, 290 bp, Homo sapiens
  misc_feature (1)..(290): n=a,t,g or c
gaatttnanagcattaagtgcattttattttattgtattagcacataaattgatgaagccacatggtgaaaatctgtgagaaactgaaggttttcatttgttttctgtgccccactgtatatcacctttcaaaataatgctttctgctgggtccaaacttcacttggagcaaagaaaggtagttaaaaggtttcacttaaagctacttcgttatgggtgctactgaaagtaaggtaaaagcaaacagcagtaacatggggactttaantgaggcaagagaagggattcag

SEQ ID NO: 5109 - DNA, 551 bp, Homo sapiens
  misc_feature (1)..(551): n=a,t,g or c
gttcataaccaacaatataaaccgtggtctcatgtaacacataaacaattcatgcctttcatagtttattattattaaagtctaaacaaaattgcaatttcttaggtaaccttatatttacaataaatgaagattaccctcaaatgctagaagctgtctaggtccgtccggtgtgtcagattttcctcagattagatgtgccaataaccaagtttattcagtaaacaacttgtacttgtttcatctggttttattactctcacccataaacagtaatgactctctgaccctctggaaatatgtaatgcttccaatcttgctttgtgtatctcatttaatttgttataaggtagtactgattttagcatattaatgcgatttcttccntgttgtttgctttggnctgtgttcaatccngagggccttaaattgtccattattttggggaggaaaacccgtatttttgttaggttacatattatggaaatttcacttcagggggaactgctgggctnccgtggcttggtttcntaggtacttttccgtgccgg

SEQ ID NO: 5110 - DNA, 369 bp, Homo sapiens
  misc_feature (1)..(369): n=a,t,g or c
gaacttgccaccttatgcccggccccgattcctcaggctccaggagtctttggccaccacagagaccttcaaacagcagaaagttcggatggcaaatgagggcttcgaccccagcaccctgtctgacccactgtacgttctggaccaggctgtaggtgcctacctgcccctcacaactgcccggtacagcgccctcctggcaggaaaccttcgaatctgagaacttccacacctgaggcacctgagagaggaactctgtggggtgggggccgttgcaggtgtactgggctgtcagggatcttttctataccagaacntgcggtcactattttgtaataaatgtgggctggagctgatccagctgtctct

SEQ ID NO: 5111 - DNA, 342 bp, Homo sapiens
tttttttttttgatgatttggatattattattacaaagaatttaaatatacaagtttggctatgaaagacccagctaagccacttaggcaaaagtctatctttgatgtcatagtttccaagaagtatcataagagtcaaacagttaaacatttctctgtgcttttttttctattttctagaaatgttgtagagagaagctcatcaacttacttatacaaatcagatatactgaggaggggagataaactgacatttccatattttataatataatgtggaaagattcagaaatgactgagaagatacagtgatatgatatttaaagcaaatattggcatatc

SEQ ID NO: 5112 - DNA, 440 bp, Homo sapiens; identical to SEQ ID NO: 202
  misc_feature (1)..(440): n=a,t,g or c

SEQ ID NO: 5113 - DNA, 1806 bp, Homo sapiens; identical to SEQ ID NO: 653

SEQ ID NO: 5114 - DNA, 2304 bp, Homo sapiens; identical to SEQ ID NO: 302

SEQ ID NO: 5115 - DNA, 327 bp, Homo sapiens
tttaaaatagctaaataaatctttaatatttctaattgcaaatgtacagaaattgcacagccacacagagtcttagaacaccaacagcttcctctgtacattattacatagttaaaagtcgcagctggagggaggagctccagcccaaactccaacgtttgcattttttccttttcacatacttacaaaagaggggagctgggacgcggtgtgggagctggggggctttgtggctgagtgtgtagaaaagagagaggctgtttccctggacagtctggctcccgcagtcgtgcgggccgcagggggaggtgtacctggggcagatgc

SEQ ID NO: 5116 - DNA, 418 bp, Homo sapiens; identical to SEQ ID NO: 600

SEQ ID NO: 5117 - DNA, 382 bp, Homo sapiens
ttttttcatgttttagcaaaatttattagttcgtgttgggccacattcaaagccatccacacaagcttcttgtaggccattgtaacacaatgttaaaaggtacagtaaaaatacagtattataatcttattgtgtagcacggctgtgaggctcattgttgaatgaagcatccttaggcagcacgtgactgcatgcagatatgtgtgctgaaagaactttgcctttttaactaaattaatggacccaggaacagaacttggtcttttacttgccattcattgtccttcataagggatggcctcccaacacttaacttcagctcttcaaatacttgtcattaaaccttctaatactacaaacttactacccagagtatacacat

SEQ ID NO: 5118 - DNA, 409 bp, Homo sapiens
gtttcaggtgttttattaagtgggccatactgtagctggtttctaagttgcaaaacataaatttaataataataacatagccagttagattgtgacaagcttttcctttccttaaaaaaagaaaatacttaaaaacacacaatggcgggttaaataaataaaacattttaaaaaagaaaaaagaaaagaaaaacctgttaaaacatgcttatgtttacttctgtgaaactgtgccaacaggaaatgtggtatttggcacgatgacacatcccggcatgtctccttcccaaacaatactgacaaaaaagaaaatacgtgggactgactcatcggtgcttgcttagaggcactactaaaaatccctttgattggagcatggggcttcccgcgcagacacctgtgtgtggcc

SEQ ID NO: 5119 - DNA, 1757 bp, Homo sapiens; identical to SEQ ID NO: 3533

SEQ ID NO: 5120 - DNA, 290 bp, Homo sapiens
tttttttttttttttttggcaccaaattagaacaattttattatttaacataataccaatgtatatacattatcctcccaaataagaaacaatttgattccaaagtttaaaatgtagtttccaaaatgaacccttgtaaatttgaagaaaaagaaagaaagccctgcaagttacacaaattttgatccatgactaaaataggcaccctgtaccaatcacctttctcatacaaaaatgtatattataaataaaactttcaaaaaagatcttggatgttttattgcacatca

SEQ ID NO: 5121 - DNA, 150 bp, Homo sapiens
ttttttccttgtataaattattttatttattattgtaattagatcttcacaaagttgtcttttcactgtgttttgtcaacgtgaaattaaattgtagttataagcaaaagttggttgcctagggaacaattgtatattcagtttaacaga

SEQ ID NO: 5122 - DNA, 547 bp, Homo sapiens; identical to SEQ ID NO: 3381

SEQ ID NO: 5123 - DNA, 440 bp, Homo sapiens
  misc_feature (1)..(440): n=a,t,g or c
aacaacatggagattttgttattanaaatttcaaaacaaaatgaaggaatttccacatatttataaccttcaaagtacaatattaatacatgtctgtcagttagaaagaacagcagtttgttaggctacaaggtttaacataaaaccaatttacaaatgtgaaaagcagtagtggtccaatattcaccattacacatgaatctgtttcttccagaattttttaaaattaaaattttagtatcgtgaaatattaaaataacaccccaaacatgccacaatcactattcacaaataaagttaaaatggaatatacaaaaatccacttaatactgttaaataacaacaataaactacaagatttcctgaacagaaatggtaggacccctgaatttttacagtgaatttcaggaaaagaaattaagttatgactattttcatga

SEQ ID NO: 5124 - DNA, 353 bp, Homo sapiens
ttttttttttttttttttttttttttttttaccaggcgatacagactatttgtttattatgaaactaactggtaaagcagagtaaatcccattctatattatagcactacaaacatccttagtcattccttcatttgttcattcattcattcatgcattcagtgagtatttcttaagctcctacagtgtaccaggaggcactctgttcattgtggcattacaaagataaagattaaggcacgtactctgccctcaaggagctcccaatctaattgtgcagagagatgtaaaaatgaagcatgaaactccatcgtgaggagcgccgagaacaaaagtctgctcgaagtgaggca

SEQ ID NO: 5125 - DNA, 434 bp, Homo sapiens
tttttttttttttgcattttttaaatggctttattaaaggctacaagtataaaatatgactaagttacaagtcgtcagtaagaatttattacttttgaaaatgttaattaaagaaagggagacgcaaagaaagggaggctcttcctgaaatccacacaggggggtgcggctcagacgggtgacagacccccgctgttcccagtagggcagcacccccaaacccagggggccaagggaggggctcccagatgaaacagaggctggttgctgatttcttgggggaacttttgtaaaaatgaagacactgaatccttgagctgaatcccaggtgcagagactggggggaggtggagaatccaaaatcatgctcaggtttctcctgaaaagtgtgtattttctaaaaaataaatataaactcctggtttgagaaactc

SEQ ID NO: 5126 - DNA, 418 bp, Homo sapiens
tttttttttttttttagggttgaaatgatgtgcttttatgggaaacaaaaatatccaacaacaataacaaaagcccttcaatctcgccaagttcttaaccagtgacaataaggcaacttccatgattgcgtctggctggggatgattctaaagggtcaggaaagtgaaaagacattggccaaaaagagaagttgcagggagggctgacatcctacatgagaacacagcagacttccctctggcccctcaccctatcaccccttcaatttagaatctccccccaatctacaaagatccttcctgaatttcctcagatgcaatctcttccagaaagctttcctgggtctgctctagctgcatatgacttttcattaacatcacgcacactttctcattccttctccgatcactttctgcc

SEQ ID NO: 5127 - DNA, 327 bp, Homo sapiens
tttttttttttttggcttcagaattttattttaaaggttatacaggatcagattatgagactgttgcaaacctgggtaatctgtcaggtgtatgagatgaaagagaaaagccagtcaaatgaaaagacaaagtaaatatgtttttcattttatagaaccattcagtagtaatgtaaccattcagttaaccactggttaactgttatgataactgaatgttaatcagttaaccattcaaaactaaccattcagatttctctatacatgagccacattattaatgtgatctctaaatcttttggtaagttaaaatattcgtgtttatta

SEQ ID NO: 5128 - DNA, 499 bp, Homo sapiens
  misc_feature (1)..(499): n=a,t,g or c
gaaaatttgcctcctggtaaccctgtaatggatggggcccagaaatgaaatatttgagaaaaacaagtgaaaaggtcaagatacaaatgtgtattaaaaaaaaaaagcctattaatagggtttctgcgcggtgcagggttgtaaacctgcntttatcttttaggattattcctaaatgcatcttctttataaacttgacttgctatctcagcaagataaattatattaaaaaaataagaatcctgcagtgtttaaggaactctttttttgtaaatcacggacacctcaattagcaagaactgaggggagggctttttccattgtttaatgttttgtgatttttagctaaagagagggaacctcatctaagtaacatttgcacatgatacagcaaaaggagttcattgcaatactgtctttggatattgtttcagtactgggtgtttaaaggacaaatagctgctagaattcaggggtaaatgtaagtgttcagaaaacg

SEQ ID NO: 5129 - DNA, 300 bp, Homo sapiens
  misc_feature (1)..(300): n=a,t,g or c
gaatcatctcccgctttcccgggactttgctttcactttcntcagtcttgtggacagagtcaagtagattttcaaaagtgctccagaaaggccggaatagtcatgtagtggatgaaaagggcagtcacaaaactgcttaagaccagctgtcttgccagtaattgcagtgctttaagatttaattaaaaagccgcctgcctttaacccaagaacacttggtattagggcaccatgtcttggtcacggctgctacgtgtatctgatgtaagttnaccatggnctgtcatnattatnttgctg

SEQ ID NO: 5130 - DNA, 469 bp, Homo sapiens
tttgttttttgttttttagatttcaaggcaaggcacgtaatgtggacattatatcttcgtgcaaattaggattactggaaagagtatttttaattaaaattttaagagacatagaggcaaaatgtgtctgcccatgcacactatggatctgtcaatacaagaaatttgttgaacaaggctaatgtctgaaagcaccatgcaagttttcagcaccctgattacatttgttttctcaagagtgcgtttttatatcctacaccctggcgttcccagtttgtaaactgtaagctttacccttgtgacatggatttgcctgcctctttgtctctataatgcagattttatagaaccttttgtacaccctatgggttcttgatgcaaccagtaattttaaataaataaattctacctccaaggaggctgcagctaaaccaacataagtgctgtgttttcattaattttatttttc

SEQ ID NO: 5131 - DNA, 305 bp, Homo sapiens
  misc_feature (1)..(305): n=a,t,g or c
tttttttttttttttcagaagaaacgttttattatttttttgtcggggaaaaaaagccatataaatattagagtataaaacttgcgtgagacacaggaagagggtggggtgggagctacgtaactatgcgaagagaagcgcttataggagangtcagtacggnggaggggntcgccttagccagtggacacagcacaaaacacaacacgggccgccgcggcagatcaangacagacggctgcncggacccnccgcccgctgcccacccgccatcacgtaaaagcacaccgcantacactactggc

SEQ ID NO: 5132 - DNA, 491 bp, Homo sapiens
  misc_feature (1)..(491): n=a,t,g or c
cacggccagcctctcctgcagctgcgcgtngctcacctcgctctggcccctggtgccgtccacctccagggtggcctcaccgtccctcagcgagacggtgaccacgtgctcttggccgtcgcagacttgatctccattagggccaaggcgtatgctccacggccaggaccaccagctgcttcttgagtttcttcgtggagtgatagtctaccagtgccacagagagaggcacggcacggaggtcgggggcccagangcgcaaacaagcacgcctgtgtctgcggctgggcggattgtgaagccacgacttctacttcccaggttgattcagtcccgacgtccagaaggggtccgcatgtagtccaggctgtagaaggcgaagcttnccccggggttagaaagaagcctctctccgtcaccgagaagcactgcatcctcgtgttnatttcaccgttttcctggatggtggtgtcttctccgttcagccagtt

SEQ ID NO: 5133 - DNA, 3890 bp, Homo sapiens; identical to SEQ ID NO: 132

SEQ ID NO: 5134 - DNA, 950 bp, Homo sapiens; identical to SEQ ID NO: 4255

SEQ ID NO: 5135 - DNA, 433 bp, Homo sapiens
  misc_feature (1)..(433): n=a,t,g or c
gacagcagtgcccaagctggcatccgtcagnacntgtgggcctttgtgttttgatgctacacatgtctatggagggccacttcttctgtaagtctgtggggcctcagcatacccaataggcagcaagtttcagtatttcccagttgtatgtcctcatggtggggctatgtctcccccaccacttcccctctcatcaggctagactttaacatccatcaatcatgtcttgagtcttgctccttcctcttggcttagtcatgtgactacagatcagatgcgtggccntagtgttttaggtgtgcaggtaccatggccccaaatgctgttgtatctgactgaggaaaatgccnctgtcctcnggcgtcccnagggnccgtaggtgnnagctgaatnggcatatgtcttccactctgttcagtgtnnaacactgcca

SEQ ID NO: 5136 - DNA, 529 bp, Homo sapiens
tttttttttttggccacatgtttatttttataaaatatctagaacaggcaaatcatagagacagaaaatggattattgtttctagaggctgggggaagaggaggattagagtggcagctcactggtatggagtttctaggtagatggaaatgttctggaattagatagtggtgatgattgcacaactctgtaaatatactaaaatccactgcatcatttactttaaaggggcaaattttatggcttgtgaattacatttcaataaaaagaagatgaggaaacctaggatatgtcacaatcccatgccacaaactacttacacttccaatataaaaactatatcaacaatagtttacatcacgttcattgcttgctaaagtaaggtcatgaatgtatcaaaatattttataaaagttaaaatttaggagatccatcatttctcttttcaatccatcactgattcattcaatatatatttatgtgtatgccaggctcttcatcaggtaaagtgtttaggagagatataaag

SEQ ID NO: 5137 - DNA, 432 bp, Homo sapiens
  misc_feature (1)..(432): n=a,t,g or c
ttttttttttttttttcagaaattgaatagttttttatttgtttgggtcaatctcagtactactagaactcaaaatactatattctaattgttctaatttgtaccatctgcaaaagaccctttaagactgcttcaatgattctgaaaagaattaagnggtnttnttantaggtgcctgaccttagatattacaactgtttcatttacaaaacctccactacaaaacactaagcttgnaacaaaacaacaaaatgaaagccacataatttgagtaacacaatagtacatattcttcagctgatgagagtaatagggaatgtatatacttcctacacaaatgcatctagggaaagcaggcnatatttattccagaactagaaaaggttaccatnaaatctatcnaacaaaattcattttgggnaaattccngta

SEQ ID NO: 5138 - DNA, 464 bp, Homo sapiens; identical to SEQ ID NO: 3502
  misc_feature (1)..(464): n=a,t,g or c

SEQ ID NO: 5139 - DNA, 4187 bp, Homo sapiens
ggcgcgaacccgcagcgcttaccgcgcggcgccgcaccatggagcccgccgtgtcgctggccgtgtgcgcgctgctcttcctgctgtgggtgcgcctgaaggggctggagttcgtgctcatccaccagcgctgggtgttcgtgtgcctcttcctcctgccgctctcgcttatcttcgatatctactactacgtgcgcgcctgggtggtgttcaagctcagcagcgctccgcgcctgcacgagcagcgcgtgcgggacatccagaagcaggtgcgggaatggaaggagcagggtagcaagaccttcatgtgcacggggcgccctggctggctcactgtctcactacgtgtcgggaagtacaagaagacacacaaaaacatcatgatcaacctgatggacattctggaagtggacaccaagaaacagattgtccgtgtggagcccttggtgaccatgggccaggtgactgccctgctgacctccattggctggactctccccgtgttgcctgagcttgatgacctcacagtggggggcttgatcatgggcacaggcatcgagtcatcatcccacaagtacggcctgttccaacacatctgcactgcttacgagctggtcctggctgatggcagctttgtgcgatgcactccgtccgaaaactcagacctgttctatgccgtaccctggtcctgtgggacgctgggtttcctggtggccgctgagatccgcatcatccctgccaagaagtacgtcaagctgcgtttcgagccagtgcggggcctggaggctatctgtgccaagttcacccacgagtcccagcggcaggagaaccacttcgtggaagggctgctctactccctggatgaggctgtcattatgacaggggtcatgacagatgaggcagagcccagcaagctgaatagcattggcaattactacaagccgtggttctttaagcatgtggagaactatctgaagacaaaccgagagggcctggagtacattcccttgagacactactaccaccgccacacgcgcagcatcttctgggagctccaggacatcatcccctttggcaacaaccccatcttccgctacctctttggctggatggtgcctcccaagatctccctcctgaagctgacccagggtgagaccctgcgcaagctgtacgagcagcaccacgtggtgcaggacatgctggtgcccatgaagtgcctgcagcaggccctgcacaccttccaaaacgacatccacgtctaccccatctggctgtgtccgttcatcctgcccagccagccaggcctagtgcaccccaaaggaaatgaggcagagctctacatcgacattggagcatatggggagccgcgtgtgaaacactttgaagccaggtcctgcatgaggcagctggagaagtttgtccgcagcgtgcatggcttccagatgctgtatgccgactgctacatgaaccgggaggagttctgggagatgtttgatggctccttgtaccacaagctgcgagagaagctgggttgccaggacgccttccccgaggtgtacgacaagatctgcaaggccgccaggcactgagctggagcccgcctggagagacagacacgtgtgagtggtcaggcatcttcccttcactcaagcttggctgctttcctagatccacactttcaaagagaaacccctccagaactcccaccctgacagcccaacaccaccttcctcctggcttccagggggcagcccagtggaatggaaagaatgtgggatttggagtcagacaagcctgagtccagttccccgtttagaactcattagctgtgtgactctgggtgagtcccttaacccctctgagcccgggtctcttcattagttgaaagggatagtaatacctacttgcaggttgttgtcatctgagttgagcactggtcacattgaaggtgctgggtaagtggtagctcttgttgcttcccgttcagcgtcacatctgcagtggagcctgaaaaggctccacattaggtcacctgtgcacagccatggctggaatgatgaaggggatacgctggagttgccctgccatcgcctccatcagccagacgaggtcctcacaggagaaggacagctcttccccaccctgggatctcaggagggcagccacggagtggggaggccccagatgcgctgtgccaaagccaggtccgaggccaaagttctccctgccatccttggtgccgtcctgccccttcctccttcatgcctgggcctgcaggcccaccccagccaccactgagtccactcggagtgccctgtgttcctggagaaggcattccagggttgaatcttgtcccagcctcagcctgggacacctaggtggagagagtggtctccgctctgaattggatccaggggacctgggctcattcttcttggctcaccaaccctgcaggcctcatctttcccaaaacccactttgtcttggtgggagtgggtccgcgctgctctgcagcaggggctggggagtggacagcatcaggtgggaaagtggagtccaccctcatgtttctgtaggattctcaccgtggggctggaagaaaagagcatcgacttgatttctccaaccactcatccctctttttctttcttccaccactccccaccccagctgtagttaatttcagtgccttacaaatcctaagctcagagaaagttccatttccgttccagagggaagggaacctccctaggtccttccctggcttgttataacgcaaagcttggttgtttatgcaactctatcttaagaactgcccagcctcagctgaaaacccgaatctgagaaggaattgcgtcatgtaagggaagctggaattaagggagctgagccagtcatggttgtggcgtgtgagtcaggagacctaggtttcagcccctctctactgtcagcgagctgtgcaacgtgggcaagtcattgtcctctgagctgcagtttcctcatctgtcacatcgctacagacaagacctccctggaacccttctgattgtcttagacactgtggttgcaaaacccacggaaagcctcatttgtgtggaaagtcagaggaaaaatgatccagtggacacttggggattatctgtcattcaagatccttccttcaaccccaaggccagctcccatctcatttccagaaaggctcatacctggcttgcagggaagcatctgtcttgtcattccaggtgccagaatcctctcagagtcattgaagggtgttcacccatcccacccaaggcttggcacactgccagtgtcttagcagggtcttgtgagggctgggggcatccaggcactcagaaggcaaaggaaccaccctacccatttggcctctggagggggcagaagaaagaaagaaacctcatcctatattttacaaagcatgtgaattctggcattagctctcataggagacccatgtgcttccttgctcagtgcaaaactgatgattctacttgctgtagatgaatggttaacacgagctagttaaacagtgccattgttttgccagtgaagcctccaaccctaagccactgggacggtggccagagatgccagcagcctctgtcgcccttagtcatataaccaaaatccagaccttatccacaacccggggcttggaaaggaaggtattttggaatcacaccctccggttatgttgctccagtaaaatcttgcctggaaagaggcagtcttcttagcatggtgagctgagttcatggcttttttttgtagccagtcctgtccctggccatccatgtgatggttttggatggagttaaacttgatgccagtgggcagtgcatgtggaaagtatcagagtaagcctctcccctccagagccctgagtttcttggctgcatgaaggttttctttagaatcagaattgtagccagtttctttggccagaaggatgaatacttggatattactgaaagggaggggtggagatgggtgtggcagtgtatggtgtgtgatttttattttcttctttggtcatgggggccaaggagaaaggcatgaatcttccctgtcaggctcttacagccacaggcactgtgtctactgtctggaagacatgtccccgtggctgtggggccgctgcttctgtttaaataaaagtggcctgg

SEQ ID NO: 5140 - DNA, 372 bp, Homo sapiens
ttttctttttttttttcttttttttttttttttggtttcatttttcttttatttttttaaaaaagcccctaaattctatggcttcaagggagcatcagagaaacgtaaatgccatttctgtacacttggtaaagcaaaaactagactcacagccaccgccctgggacggcccaagctgctccactctgcccggcagcctccagggcaccccactgggaaccgcccgccagtccagggccgcccccaggcccctgcaatatacctgcagggctgggccgtggggctttaaggcgttttgtctccggctgcttgccggatgtcggagcagagaggcaggaagctccgtgcccacgcgccccacgcggcagggct

SEQ ID NO: 5141 - DNA, 386 bp, Homo sapiens; identical to SEQ ID NO: 638

SEQ ID NO: 5142 - DNA, 426 bp, Homo sapiens
taaagcataagcaatagagtaaatgcatgagtaaatatcttgagtatcccataaaccttaatgttaaagtcatattgtaaatctctgacttcttattaccaaggacactctatctgttgcctcttactcttgacagatcttggtctcaacaataaattcgttggggaagtgtctaatcttccagcatttatcaatggcacgtttgttgaaacccagcaagaggtctctgcgacgaaggggaaaggactttctgttattgcaaagttggtaaataaagatgccaaggttactaacatcacgaatttcctccacagcaactaggtcttctcgaaccacataagtttgaggcaggatatctgccactcgccagtttgccaaagagctctaccagattttttggaggcataacaatagaagtattgaggg

SEQ ID NO: 5143 - DNA, 145831 bp, Homo sapiens; identical to SEQ ID NO: 646

SEQ ID NO: 5144 - DNA, 325 bp, Homo sapiens; identical to SEQ ID NO: 554
  misc_feature (1)..(325): n=a,t,g or c

SEQ ID NO: 5145 - DNA, 6491 bp, Homo sapiens
ccgccccggcgcccaggctcggtgctggagagtcatgcctgtgagccctgggcacctcctgatgtcctgcgaggtcacggtgttcccaaacctcagggttgccctgccccactccagaggctctcaggccccaccccggagccctctgtgcggagccgcctcctcctggccagttccccagtagtcctgaagggagacctgctgtgtggagcctcttctgggacccagccatgagtgtggagctgagcaactgaacctgaaactcttccactgtgagtcaaggaggcttttccgcacatgaaggacgctgagcgggaaggactcctctctgcctgcagttgtagcgagtggaccagcaccaggggctctctagactgcccctcctccatcgccttccctgcctctccaggacagagcagccacgtctgcacacctcgccctctttacactcagttttcagagcacgtttctcctatttcctgcgggttgcagcgcctacttgaacttactcagaccacctacttctctagcagcactgggcgtccctttcagcaagacgatggctgtgctcaggcagctggcgctcctcctctggaagaactacaccctgcagaagcggaaggtcctggtgacggtcctggaactcttcctgccattgctgtttcctgggatcctcatctggctccgcttgaagattcagtcggaaaatgtgcccaacgccaccatctacccgggccagtccatccaggagctgcctctgttcttcaccttccctccgccaggagacacctgggagcttgcctacatcccttctcacagtgacgctgccaagaccgtcactgagacagtgcgcagggcacttgtgatcaacatgcgagtgcgcggctttccctccgagaaggactttgaggactacattaggtacgacaactgctcgtccagcgtgctggccgccgtggtcttcgagcaccccttcaaccacagcaaggagcccctgccgctggcggtgaaatatcacctacggttcagttacacacggagaaattacatgtggacccaaacaggctcctttttcctgaaagagacagaaggctggcacactacttcccttttcccgcttttcccaaacccaggaccaagggaactaacatcccctgatggcggagaacctgggtacatccgggaaggcttcctggccgtgcagcatgctgtggaccgggccatcatggagtaccatgccgatgccgccacacgccagctgttccagagactgacggtgaccatcaagaggttcccgtacccgccgttcatcgcagaccccttcctcgtggccatccagtaccagctgcccctgctgctgctgctcagcttcacctacaccgcgctcaccattgcccgtgctgtcgtgcaggagaaggaaaggaggctgaaggagtacatgcgcatgatggggctcagcagctggctgcactggagtgcctggttcctcttgttcttcctcttcctcctcatcgccgcctccttcatgaccctgctcttctgtgtcaaggtgaagccaaatgtagccgtgctgtcccgcagcgacccctccctggtgctcgccttcctgctgtgcttcgccatctctaccatctccttcagcttcatggtcagcaccttcttcagcaaagccaacatggcagcagccttcggaggcttcctctacttcttcacctacatcccctacttcttcgtggcccctcggtacaactggatgactctgagccagaagctctgctcctgcctcctgtctaatgtcgccatggcaatgggagcccagctcattgggaaatttgaggcgaaaggcatgggcatccagtggcgagacctcctgagtcccgtcaacgtggacgacgacttctgcttcgggcaggtgctggggatgctgctgctggactctgtgctctatggcctggtgacctggtacatggaggccgtcttcccagggcagttcggcgtgcctcagccctggtacttcttcatcatgccctcctattggtgtgggaagccaagggcggttgcagggaaggaggaagaagacagtgaccccgagaaagcactcagaaacgagtactttgaagccgagccagaggacctggtggcggggatcaagatcaagcacctgtccaaggtgttcagggtgggaaataaggacagggcggccgtcagagacctgaacctcaacctgtacgagggacagatcaccgtcctgctgggccacaacggtgccgggaagaccaccaccctctccatgctcacaggtctctttccccccaccagtggacgggcatacatcagcgggtatgaaatttcccaggacatggttcagatccggaagagcctgggcctgtgcccgcagcacgacatcctgtttgacaacttgacagtcgcagagcacctttatttctacgcccagctgaagggcctgtcacgtcagaagtgccctgaagaagtcaagcagatgctgcacatcatcggcctggaggacaagtggaactcacggagccgcttcctgagcgggggcatgaggcgcaagctctccatcggcatcgccctcatcgcaggctccaaggtgctgatactggacgagcccacctcgggcatggacgccatctccaggagggccatctgggatcttcttcagcggcagaaaagtgaccgcaccatcgtgctgaccacccacttcatggacgaggctgacctgctgggagaccgcatcgccatcatggccaagggggagctgcagtgctgcgggtcctcgctgttcctcaagcagaaatacggtgccggctatcacatgacgctggtgaaggagccgcactgcaacccggaagacatctcccagctggtccaccaccacgtgcccaacgccacgctggagagcagcgctggggccgagctgtctttcatccttcccagagagagcacgcacaggtttgaaggtctctttgctaaactggagaagaagcagaaagagctgggcattgccagctttggggcatccatcaccaccatggaggaagtcttccttcgggtcgggaagctggtggacagcagtatggacatccaggccatccagctccctgccctgcagtaccagcacgagaggcgcgccagcgactgggctgtggacagcaacctctgtggggccatggacccctccgacggcattggagccctcatcgaggaggagcgcaccgctgtcaagctcaacactgggctcgccctgcactgccagcaattctgggccatgttcctgaagaaggccgcatacagctggcgcgagtggaaaatggtggcggcacaggtcctggtgcctctgacctgcgtcaccctggccctcctggccatcaactactcctcggagctcttcgacgaccccatgctgaggctgaccttgggcgagtacggcagaaccgtcgtgcccttctcagttcccgggacctcccagctgggtcagcagctgtcagagcatctgaaagacgcactgcaggctgagggacaggagccccgcgaggtgctcggtgacctggaggagttcttgatcttcagggcttctgtggaggggggcggctttaatgagcggtgccttgtggcagcgtccttcagagatgtgggagagcgcacggtcgtcaacgccttgttcaacaaccaggcgtaccactctccagccactgccctggccgtcgtggacaaccttctgttcaagctgctgtgcgggcctcacgcctccattgtggtctccaacttcccccagccccggagcgccctgcaggctgccaaggaccagtttaacgagggccggaagggattcgacattgccctcaacctgctcttcgccatggcattcttggccagcacgttctccatcctggcggtcagcgagagggccgtgcaggccaagcatgtgcagtttgtgagtggagtccacgtggccagtttctggctctctgctctgctgtgggacctcatctccttcctcatccccagtctgctgctgctggtggtgtttaaggccttcgacgtgcgtgccttcacgcgggacggccacatggctgacaccctgctgctgctcctgctctacggctgggccatcatccccctcatgtacctgatgaacttcttcttcttgggggcggccactgcctacacgaggctgaccatcttcaacatcctgtcaggcatcgccaccttcctgatggtcaccatcatgcgcatcccagctgtaaaactggaagaactttccaaaaccctggatcacgtgttcctggtgctgcccaaccactgtctggggatggcagtcagcagtttctacgagaactacgagacgcggaggtactgcacctcctccgaggtcgccgcccactactgcaagaaatataacatccagtaccaggagaacttctatgcctggagcgccccgggggtcggccggtttgtggcctccatggccgcctcagggtgcgcctacctcatcctgctcttcctcatcgagaccaacctgcttcagagactcaggggcatcctctgcgccctccggaggaggcggacactgacagaattatacacccggatgcctgtgcttcctgaggaccaagatgtagcggacgagaggacccgcatcctggcccccagcccggactccctgctccacacacctctgattatcaaggagctctccaaggtgtacgagcagcgggtgcccctcctggccgtggacaggctctccctcgcggtgcagaaaggggagtgcttcggcctgctgggcttcaatggagccgggaagaccacgactttcaaaatgctgaccggggaggagagcctcacttctggggatgcctttgtcgggggtcacagaatcagctctgatgtcggaaaggtgcggcagcggatcggctactgcccgcagtttgatgccttgctggaccacatgacaggccgggagatgctggtcatgtacgctcggctccggggcatccctgagcgccacatcggggcctgcgtggagaacactctgcggggcctgctgctggagccacatgccaacaagctggtcaggacgtacagtggtggtaacaagcggaagctgagcaccggcatcgccctgatcggagagcctgctgtcatcttcctggacgagccgtccactggcatggaccccgtggcccggcgcctgctttgggacaccgtggcacgagcccgagagtctggcaaggccatcatcatcacctcccacagcatggaggagtgtgaggccctgtgcacccggctggccatcatggtgcaggggcagttcaagtgcctgggcagcccccagcacctcaagagcaagttcggcagcggctactccctgcgggccaaggtgcagagtgaagggcaacaggaggcgctggaggagttcaaggccttcgtggacctgacctttccaggcagcgtcctggaagatgagcaccaaggcatggtccattaccacctgccgggccgtgacctcagctgggcgaaggttttcggtattctggagaaagccaaggaaaagtacggcgtggacgactactccgtgagccagatctcgctggaacaggtcttcctgagcttcgcccacctgcagccgcccaccgcagaggaggggcgatgaggggtggcggctgtctcgccatcaggcagggacaggacgggcaagcagggcccatcttacatcctctctctccaagtttatctcatcctttatttttaatcacttttttctatgatggatatgaaaaattcaaggcagtatgcacagaatggacgagtgcagcccagccctcatgcccaggatcagcatgcgcatctccatgtctgcatactctggagttcactttcccagagctggggcaggccgggcagtctgcgggcaagctccggggtctctgggtggagagctgacccaggaagggctgcagctgagctgggggttgaatttctccaggcactccctggagagaggacccagtgacttgtccaagtttacacacgacactaatctcccctggggaggaagcgggaagccagccaggttgaactgtagcgaggcccccaggccgccaggaatggaccatgcagatcactgtcagtggagggaagctgctgactgtgattaggtgctggggtcttagcgtccagcgcagcccgggggcatcctggaggctctgctcccttagggcatggtagtcaccgcgaagccgggcaccgtcccacagcatctcctagaagcagccggcacaggagggaaggtggccaggctcgaagcagtctctgtttccagcactgcaccctcaggaagtcgcccgccccaggacacgcagggaccaccctaagggctgggtggctgtctcaaggacacattgaatacgttgtgaccatccagaaaataaatgctgaggggacacaaaaaaaaaaaaaaaaaaaaaaaa

SEQ ID NO: 5146 - DNA, 1399 bp, Homo sapiens
agtgtgaaatcttcagagaagaatttctctttagttctttgcaagaaggtagagataaagacactttttcaaaaatggcaatggtatcagaattcctcaagcaggcctggtttattgaaaatgaagagcaggaatatgttcaaactgtgaagtcatccaaaggtggtcccggatcagcggtgagcccctatcctaccttcaatccatcctcggatgtcgctgccttgcataaggccataatggttaaaggtgtggatgaagcaaccatcattgacattctaactaagcgaaacaatgcacagcgtcaacagatcaaagcagcatatctccaggaaacaggaaagcccctggatgaaacacttaagaaagcccttacaggtcaccttgaggaggttgttttagctctgctaaaaactccagcgcaatttgatgctgatgaacttcgtgctgccatgaagggccttggaactgatgaagatactctaattgagattttggcatcaagaactaacaaagaaatcagagacattaacagggtctacagagaggaactgaagagagatctggccaaagacataacctcagacacatctggagattttcggaacgctttgctttctcttgctaagggtgaccgatctgaggactttggtgtgaatgaagacttggctgattcagatgccagggccttgtatgaagcaggagaaaggagaaaggggacagacgtaaacgtgttcaataccatccttaccaccagaagctatccacaacttcgcagagtgtttcagaaatacaccaagtacagtaagcatgacatgaacaaagttctggacctggagttgaaaggtgacattgagaaatgcctcacagctatcgtgaagtgcgccacaagcaaaccagctttctttgcagagaagcttcatcaagccatgaaaggtgttggaactcgccataaggcattgatcaggattatggtttcccgttctgaaattgacatgaatgatatcaaagcattctatcagaagatgtatggtatctccctttgccaagccatcctggatgaaaccaaaggagattatgagaaaatcctggtggctctttgtggaggaaactaaacattcccttgatggtctcaagctatgatcagaagactttaattatatattttcatcctataagcttaaataggaaagtttcttcaacaggattacagtgtagctacctacatgctgaaaaatatagcctttaaatcatttttatattataactctgtataatagagataagtccattttttaaaaatgttttccccaaaccataaaaccctatacaagttgttctagtaacaatacatgagaaagatgtctatgtagctgaaaataaaatgacgtcacaagac

SEQ ID NO: 5147 - DNA, 3270 bp, Homo sapiens; identical to SEQ ID NO: 831
  misc_feature (1)..(3270): n=a,t,g or c

SEQ ID NO: 5148 - DNA, 603 bp, Homo sapiens
  misc_feature (1)..(603): n=a,t,g or c
tatgaaacaaagttttaatttttattttacatatttatacataaaactttcaaggaaccctctgaatccaacagaatgttaatagcacatctaaaaaggaacttcaggtagtcaacattcacaaaatgttgaaaactgagtaaaatatacatattacggagagctacaacttcactacgaggcaggcatgtattttttgacttgtatagcaccgtcatttacagttcttctttaaaactacagtgaagaatgaaaagtagtcaatgggaaaatactgttccaacttaaaatctctaaacaaataaaaataaagttaaaactactctcttttattaaccatgatttgtggtggtgtcagtactgtacattttttgtaacaatattttattaaaatgcctgatattaagtggcacagtaaaaaattaaaataaattaagaagcaaaggccaatcactggacattaagctcgacttatcaatgactaacactgatatttgtttctgcgccaccttagcaacagctttttaccaccacggaggcaaataaattctagctgttccnggttgaatggctcttcacttgcaggctttcccgccagtgctc

SEQ ID NO: 5149 - DNA, 280 bp, Homo sapiens
  misc_feature (1)..(280): n=a,t,g or c
accacacaagtttatttaaataaaagtgaacacatatgcaggctggtgcccgaggggcagggggtggggagggcaggtgggaagcagacagacaatggggtccaggcagagtttgtntggtgaaccaggctgctggagggagtggctgggggcctcagggcagcgctgggattcantgctngggcagggggccttnggtgggtgagcctggtgccaggaggtcatttccatccctcacatgcccccctccctttccctgaccccctgggcctacagcact

SEQ ID NO: 5150 - DNA, 439 bp, Homo sapiens; identical to SEQ ID NO: 2302

SEQ ID NO: 5151 - DNA, 393 bp, Homo sapiens; identical to SEQ ID NO: 802

SEQ ID NO: 5152 - DNA, 409 bp, Homo sapiens
tttttttttttgttgttaagcttaaatcatctttattcagctcaggagtggggtggctggaacataagcttcaggtccaggaagatgggtttggatggagcctcgggcgacttgctctctggaataatactcaaaacatttaactccgccaagcttcagtgtccttataaaaaatgaggaaacaatactggtcccgtgacattgtgtaaagattgaatagtacataatatgctgtattagaagtgcttgtcaaggttcttggcaaatgataggtgctcagtcaatagcctctgtgtatagtaacagttctggtagtaattttggtagctggggggatggtaataactgtgacagcaacaagtatcttattcccatttcacagatgaagacataagctctgggaaaaaaa

SEQ ID NO: 5153 - DNA, 1081 bp, Homo sapiens; identical to SEQ ID NO: 155

SEQ ID NO: 5154 - DNA, 451 bp, Homo sapiens
agatttttatttaaacacttttattacaatatttaggtggcacaataactaacaagcttctgagacaggaggtaacattctcatagactttgcaactcagccagaagtaaaactcgaaataaatatgtcatttaaagtaactatgaaggtaataataaaaggagtgttgttagtactaagaaggttttcaatgcagggtccaatagctatatttacatatacagaaaaaatgaaattagttactaaacataacaaaaaaaacttggtatacctatagcaatgcatatttaccaaaaactggtgaaaaatatattgagagatatgttaaatatttgctgaaaagaaaactacttgtctgtatgtgaaaccccatgaatcattttacacatcaggaccaaaaaactaactccttttattcctcaaaaatcaaaagtggtctcatctaacccaa

SEQ ID NO: 5155 - DNA, 435 bp, Homo sapiens
tttttttttttttttttgagcaataaagctgtttatttcacctgggtgcaggtgggctgagtccgaaaagagagtcagcgaagggtgatggattatcattagttcttataggttttgggttaggcggtgaagttaagagcaatgttttgtgggcagggtggatctcacaaagtacattctcaagggtggggagaattacaaagaaccttcttaagggtggggaagattacaaagtaccttcttaagggtgggggagattacaaagtacattgatcagttagggtggggcaggaacaaatcacaatggtggaatgtcatcagttaaggctatttttacttcttttgtggatcttcagttactttaggccatctggatgtatacgtgcaaatcacaggggatgcgatgcttggcttgggctcagaggcctgacacat

SEQ ID NO: 5156 - DNA, 338 bp, Homo sapiens
  misc_feature (1)..(338): n=a,t,g or c
gtttaatggaaacctgctgggctggagggagttaggctgaatttcccgacttcctctgccagttattgacacagctctctttgtaagagaggaaagaaactaaacccacccaagggatgatttcnnggggagaggtggagggcagatgtcctgggcaaaccgggcccctctgcccacacacctcacttgatccttttgccaaacttgtcaaactcaggggaactggcttcccagttgcccctttgccatattccaagtccccctcagacttcatgtctctgctcatcagcactgtcccaggatcctggggagggagaacccctggccccatgggaaag

SEQ ID NO: 5157 - DNA, 264 bp, Homo sapiens; identical to SEQ ID NO: 526

SEQ ID NO: 5158 - DNA, 424 bp, Homo sapiens; identical to SEQ ID NO: 608

SEQ ID NO: 5159 - DNA, 466 bp, Homo sapiens; identical to SEQ ID NO: 652

SEQ ID NO: 5160 - DNA, 4763 bp, Homo sapiens
  misc_feature (1)..(4763): n=a,t,g or c
cccctcaccccactcaactgccccgggcccccgcgcgcgcggccgcccctccactcaccctgtgtcggccccgctcccctctcccccaccaggcgagcaggcgagcgggcagagcccgcggcggaggtcggcgcggctccggggttcatggtgacgaggcggcggccgctcgagcccagcggcggcgggcggcgggagctggggcgcgggcccgggccgcctctcccagagcgcggggccgggcggcgggcgcgcccaggcagcggctgcgagcgcccccccgcgccgcgcccccgcgccccccgcgccgcgcccccgcgcgcttggcttgcggggggccgggcctgcgggcggccgccgcgccgcgcacccatggacggcccggccatcatcacccaggtgaccaaccccaaggaggacgagggccggttgccgggcgcgggcgagaaagcctcccagtgcaacgtcagcttaaagaagcagaggagccgcagcatccttagctccttcttctgctgcttccgtgattacaatgtggaggcccctccacccagcagccccagtgtgcttccgccactggtggaggagaatggtgggcttcagaagccaccagctaagtaccttcttccagaggtgacggtgcttgactatggaaagaaatgtgtggtcattgatttagatgaaacattggtgcacagttcgtttaagcctattagtaatgctgattttattgttccggttgaaatcgatggaactatacatcaggtgtatgtgctgaagcggccacatgtggacgagttcctccagaggatggggcagctttttgaatgtgtgctctttactgccagcttggccaagtatgcagaccctgtggctgacctcctagaccgctggggtgtgttccgggcccggctcttcagagaatcatgtgtttttcatcgtgggaactacgtgaaggacctgagtcgccttgggcgggagctgagcaaagtgatcattgttgacaattcccctgcctcatacatcttccatcctgagaatgcagtgcctgtgcagtcctggttcgatgacatgacggacacggagctgctggacctcatccccttctttgagggcctgagccgggaggacgacgtgtacagcatgctgcacagactctgcaataggtagccctggcctctgcctgcctcccgcctgtgcactctggaacctctggcctcaggggacctgcctgtcctcagctccctgggagctgaaagtgaggatactccgtgctccaggccacagggtgaatgtggccatgcctacctgttttgtttttttaagaacagaaacaactattttaaaagaactcttttaagaaatttcataaagggacatgcattttactgggtttgcttttcttaaaacataccaaaaaagaaaaaaatagaaaaaaaaaaaaaaaaagctgatctctatcagactcttcaactgtcctccctccaagcagaccacctgtccccttctatcccagctcagagcagctgacccaactcagaatctctttcctacaggatgaaagtgccttttgaatgttatttttaagccgagagttaatttttctacacaacatatttccagacatcttttagtcttttattgtcttagatactataagaagatgaacatgacaattttctagaacctggtagcgtgtgtgtgtggttggcggggggtgctgagggaggggagtgagtcacaggagcctgtcccccaacaggtgtgactgctctgacaacctgtggcatgctgcagggtcaggctcctgataggaggatttcatgactatgtcattgtctccactcatttttgacccagtttggaatgtatctgcaattgtgtggctcaacactttaggaaacatagattattttatattattatttctgatggtgacaagtttgtcttgaggtcacattttctccttgaaaagtgacatcctgtcacttctgctctcacactactgccatacatttgtgtttttttgttgttattgtttgggtagagcagttacaagaaaccctaaaacccttggatataaaagaaatctgtttattgatttttaaatctttcctttccaaaagctggatacacatggagctgtttgggaattttccttgctgctaccgcgctgccaccaaatggaattgaccagcggctgttacactgttctttgccactgtgcctatgctcagaatatgctcactgctaagctacaaactcggacagggtcagaaacagaggtgtcccatcccattgcagcctccaccacctgtaaccccttcctggcattggccactgaagggtacaaaggcaaaaggaccacagcaccacttaggtgtagcatggattttaaactgcagtcagtatcagatcctgtttgataaataagctgactgttctctcttgagaacctgtggcctcaaccagccaccaagctgatgtggcccaagctccatctcttggtcttctcctttgaagcacagcctatttctgagccaagggttggggaagcctgtctagatgtgggactcattgccccaaaccagggagaggaagagctcccacagggagagcccaggctctctttgcagcctttcccagtttggtgtttaaagcagtgccatgttccttgtttgacaacaagacagtctgtaaagtattgctcttaaaaacaattaaaaagaaccctttcatattggcaccattgccttagtcctctgtgggttggtcttcagccagcattctggtgggagtgactggcattaacaagactggaaatcgggggtcaaagtaaaatatctttgttttgctttcattcacaaagtaatgaagccagctgccaattacatcctcccaacagcactttggtctgtgactgctgtgtgatattcagaagggaagtagtattcagggggtaaacaggtctcccagcattctgagtgttccaaaccagtaatccacatgccaattcaaatagaacagccccttgctagatattaccacagataatgacagtacatggtagaactgcccatgccacaaatatttatttggaaaagtagtcattaaatgaacccactgccttaaatgtcttgaatgttgcagtcaagtgtctgtcatgtgttgatatccacacagaattaggccctaatgagagccttagaccctcaaccatgcccccttcgttggcatcacagggccttatttggaagagcggggcaaagaggatggaaatcataaaatatttcatgggaatcgaacctagggatagtgctccacttctgacgatggagtgaagacacttggcagacttgagccagacacttcacctagtagttcctgaaactgtgagcaccactgcactaagccagtgcggagctgttagggacgggcccagctcctgcacacggacacagaatgtctggagagggcagcaggcctctgagggttctggaatctgtgccaccttatttgaccacactccaaaattctgtttttattttaacccttgaatctgctttatgtacataatcaaaatatctatatctatatctatatctatatctatatatttttaatcatctacatgtaaatgaagcaatagaattctaacataaggccaagaaatgagacgaatgtttggggtttatgttttttaaggtaaatacgggtattgtttttaattattaccatgtattaaattgtgggctttgaaacctaatgaaacctgttagccacttctctgtgccatatacttcccatgttaccaaaatacgcccaactctttagccaaaagagaacnctgacctcctgagtttccatgctcctttctgtcaggtttaaatgtagtcttctggagaagtatttttgacattgagctctgggacaggacaccttgggtttgtggactgcagcccactatgatgttattacttctctggccaggcctccagtggaagtgcacaggcactcccaatgttgttaatgctctgtcttccatttgttctggaatcctacgtgttggtctgtggttccatgcattagctgtttgtaaataatgcatttgcatactgaaaaaggaatgccacctgccacagttgatggtgagaagctcctttgacgtggtgcaattttgatgagatgtctctggggacacgaggatgccctaatgatgctgacttgtcatggttgcagcatttgaacttttggtgttaaaaaaaaaaacctgtaagtctgtaacctggcaacattttacaaccctgtatttttaaagatggctttctaataaaaaatccagaaccacacagccctatggtcaaacaatcctacgtttgtgcctctgcttttaaaggtgctgtgctggacagttggcatgccagggttcgagaagagtgaatggcttgacgtccttgcagttaactgtgcaaaattggctggctgcctctgttcctactgtactgtaactttgatcatgtctgttcctattccattctcccaggagcttctctgcagactgacacaccctcccccaccccgggtagtggagatgctggtgtctgggtagtcatggatttctgctgacatttgaatgtgataaacaatccagcattacttaggaaatgctacatgcggaatgtgcacgtttccaggggcgagtattgtcaatcaaaaggtttgcaatgatttccttcctgccaaaaataaacatgtgaaactgc

SEQ ID NO: 5161 - DNA, 473 bp, Homo sapiens
gctttcggtggttccttggtgactgggaattgcttgtgtgcatgtgttgggtgcatgcttccgggtctcagctgccccaggcccgcacaggcaaccccttcccatccaaagccattggtggagcttctctggaatcatttgccaaaagcccaaggcagaatccaagggtccaagaccatttccatggagctcatgtttttcttttctgtaggaacttttttttaaccagcacccaccataattccgaagccacgtttcatctttcctggatcactacagtgaagtattacacgttgtacacgttcccagtctggccttggcttgctcggataaaactttgtatgtattttgtatggcatagattctatattgtaatgatgtcctatgcaaaaagagaaattaacgaaattgtaaattttattgttttaacgtgtatgcatgtttagtgacgtttacattttgaaataaaattt

SEQ ID NO: 5162 - DNA, 1065 bp, Homo sapiens; identical to SEQ ID NO: 447

SEQ ID NO: 5163 - DNA, 331 bp, Homo sapiens; identical to SEQ ID NO: 633

SEQ ID NO: 5164 - DNA, 253 bp, Homo sapiens
tttttgagtttgaaaggctctttaatagcaagcgaatggtaattacatggtcggatgaggtcctcactctcaggggagggaggagggagcagaggtggacagggtgcagtataggatttacactgtttgaagcatctaacgaagggcaacagtttttggcaacccaattcacagttttgtaatttacaagagatttctttgaaaggaaataggaaggcaaagaaagcacacataccctaccggcaacacttct

SEQ ID NO: 5165 - DNA, 218 bp, Homo sapiens
agcattttcaaactttatttacaactgtcacagtgacaaaaagtagtttggaaaaaaaaaaatgctagtttctccctgrgcctcaaaaaagaacagatagaagttamagggggttcatytcacaacaggcatttttactgaaatactaggrattyyyycaatamaatcagttagaaatacacamaaattacttgaaaaaaaaaaaaaagrgggggcca

SEQ ID NO: 5166 - DNA, 483 bp, Homo sapiens; identical to SEQ ID NO: 2996
  misc_feature (1)..(483): n=a,t,g or c

SEQ ID NO: 5167 - DNA, 380 bp, Homo sapiens
  misc_feature (1)..(380): n=a,t,g or c
anattcggaacgagggtatttttaacaggaatttaagaaaatattactggaattaaaaatatatatatattaaacaagaattttctttgctctgtctagcttaaactactactcaagctgcttaagttcttaagtattgtttgtaatcaccaataaataagtgcatttgtaattcatcagtcattattagcttttattaaaagaagattacgttttacaatgtaactataatctcttgaatttgggtatcttattaatgagttttaaagatgtaaaacctaaccttttttaaagctccattgtcttatgtttttagggggntttccgtaaacatatatcttacatattaataaactttttccaaatcttggaaaaaaaaa

SEQ ID NO: 5168 - DNA, 340 bp, Homo sapiens
gtttaaagttaaagtttatttgtattctttgtaggaatatcaataaaagacctcaaacgtatctatatctgtacatgtacaagaactgtcaaaaattattcacagaacaaaaataaatcttctttagaacaaacccaggtaatgaaatgctgatacggatctcacatacggaataatctaaatgctactagcacaaaaatatggctttaaaaataaaataaaatcttgggttttgtttttctaaggtgtatttctctttcttgaaataaaaaataaattatttagagctatcattgtaaaatagtcgtgtgttaacacactcttattaaggccctggaga

SEQ ID NO: 5169 - DNA, 284 bp, Homo sapiens; identical to SEQ ID NO: 3470

SEQ ID NO: 5170 - DNA, 271 bp, Homo sapiens; identical to SEQ ID NO: 636

SEQ ID NO: 5171 - DNA, 383 bp, Homo sapiens; identical to SEQ ID NO: 685
  misc_feature (1)..(383): n=a,t,g or c

SEQ ID NO: 5172 - DNA, 206 bp, Homo sapiens; identical to SEQ ID NO: 121

SEQ ID NO: 5173 - DNA, 3344 bp, Homo sapiens
gaattccgaagacgcaaaagcagaaacccctgataaaaccatcagacttcatgagacttattcaccaccatgagaacagtatgggggaaaccaccccagtgattcaattttctcccaccagttgcctcccacaacatgtggcaattatgggagttcaattaaagatgagatttggatggggacacagagccaaaccatatcaagtacaaagaaaagagtctcataagatgcaagtgaggaagagttttgtcaaagcaacaggcttcacaagtcctggttaggaagcgtcgtgcaaattctttacttgaagaaaccaaacagggtaatcttgaaagagaatgcatcgaagaactgtgcaataaagaagaagccagggaggtctttgaaaatgacccggaaacggattatttttatccaaaatacttagtttgtcttcgctcttttcaaactgggttattcactgctgcacgtcagtcaactaatgcttatcctgacctaagaagctgtgtcaatgccattccagaccagtgtagtcctctgccatgcaatgaagatggatatatgagctgcaaagatggaaaagcttcttttacttgcacttgtaaaccaggttggcaaggagaaaagtgtgaatttgacataaatgaatgcaaagatccctcaaatataaatggaggttgcagtcaaatttgtgataatacacctggaagttaccactgttcctgtaaaaatggttttgttatgctttcaaataagaaagattgtaaagatgtggatgaatgctctttgaagccaagcatttgtggcacagctgtgtgcaagaacatcctaggagattttgaatgtgaatgccccgaaggctacagatataatctcaaatcaaagtcttgtgaagatatagatgaatgctctgagaacatgtgtgctcagctttgtgtcaattaccctggaggtcacacttgctattgtgatgggaagaaaggattcaaacttgcccaagatcagaagagttgtgaggttgtttcagtgtgccttcccttgaaccttgacacaaagtatgaattactttacttggcggagcagtttgcaggggttgttttatatttaaaatttcgtttgccagaaatcagcagattttcagcagaatttgatttccggacatatgattcagaaggcgtgatactgtacgcagaatctatctatcactcagcgtggctcctgattgcacttcgtggtggaaagattgaagttcagcttaagaatgaacatacatccaaaatcacaactggaggtgatgttattaataatggtctatggaatatggtgtctgtggaagaattagaacatagtattagcattaaaatagctaaagaagctgtgatggatataaataaacctggacccctttttaagccggaaaatggattgctggaaaccaaagtatactttgcaggattccctcggaaagtggaaagtgaactcattaaaccgattaaccctcgtctagatggatgtatacgaagctggaatttgatgaagcaaggagcttctggaataaaggaaattattcaagaaaaacaaaataagcattgcctggttactgtggagaagggctcctactatcctggttctggaattgctcaatttcacatagattataataatgtatccagtgctgagggttggcatgtaaatgtgaccttgaatattcgtccatccacgggcactggtgttatgcttgccttggtttctggtaacaacacagtgccctttgctgtgtccttggtggactccacctctgaaaaatcacaggatattctgttatctgttgaaaatactgtaatatatcggatacaggccctaagtctatgttccgatcaacaatctcatctggaatttagagtcaacagaaacaatctggagttgtcgacaccacttaaaatagaaaccatctcccatgaagaccttcaaagacaacttgccgtcttggacaaagcaatgaaagcaaaagtggccacatacctgggtggccttccagatgttccattcagtgccacaccagtgaatgccttttataatggctgcatggaagtgaatattaatggtgtacagttggatctggatgaagccatttctaaacataatgatattagagctcactcatgtccatcagtttggaaaaagacaaagaattcttaaggcatcttttctctgcttataataccttttccttgtgtgtaattatacttatgtttcaataacagctgaagggttttatttacaatgtgcagtctttgattattttgtggtcctttcctgggatttttaaaaggtcctttgtcaaggaaaaaattctgttgtgatataaatcacagtaaagaaattcttacttctcttgctattaagaatagtgaaaaataacaattttaaatttgaatttttttcctacaaatgacagtttcaatttttgtttgtaaaactaaatttttaattttatcatcatgaactagtgtctaaatacctatgtttttttcagaaagcaaggaagtaaactcaaacaaaagtgcgtgtaattaaatactattaatcataggcagatactattttgttatgtttttgtttttttcctgatgaaggcagaagagatggtggtctattaaatatgaattgaatggagggtcctaatgccttatttcaaaacaattcctcagggggaccagctttggcttcatctttctcttgtgtggcttcacatttaaaccagtatctttattgaattagaaaacaagtgggacatattttcctgagagcagcacaggaatcttcttcttggcagctgcagtctgtcaggatgagatatcagattaggttggataggtggggaaatctgaagtgggtacattttttaaattttgctgtgtgggtcacacaaggtctacattacaaaagacagaattcagggatggaaaggagaatgaacaaatgtgggagttcatagttttccttgaatccaacttttaattaccagagtaagttgccaaaatgtgattgttgaagtacaaaaggaactatgaaaaccagaacaaattttaacaaaaggacaaccacagagggatatagtgaatatcgtatcattgtaatcaaagaagtaaggaggtaagattgccacgtgcctgctggtactgtgatgcatttcaagtggcagttttatcacgtttgaatctaccattcatagccagatgtgtatcagatgtttcactgacagtttttaacaataaattcttttcactgtattttatatcacttataataaatcggtgtataattttaaaaaaaaggaattc

SEQ ID NO: 5174 - DNA, 365 bp, Homo sapiens
  misc_feature (1)..(365): n=a,t,g or c
cttttttanttttttctttttttctttttttatttttattttttcctgtaaaacagcaaacacctccatgagaagtcttggaaacttggaagtgacttcatctctcttcaatgtactgcatccataatttatcgccatgtgcaacagctttgcgttttctaaggcacaatttttaatgaaatgatgtgtagatttcaatctaataacagctcatccaaatgacaaatatggtcgaaatccctccagtggctgaggaaatttctgcacctatatggaacccacatgcaaagaacccatctagcatgtaataaataatccgctagccatactcaataagacacggaaaaattattgcttacataaca

SEQ ID NO: 5175 - DNA, 4087 bp, Homo sapiens; identical to SEQ ID NO: 809

SEQ ID NO: 5176 - DNA, 411 bp, Homo sapiens; identical to SEQ ID NO: 677
  misc_feature (1)..(411): n=a,t,g or c

SEQ ID NO: 5177 - DNA, 425 bp, Homo sapiens; identical to SEQ ID NO: 3487

SEQ ID NO: 5178 - DNA, 300 bp, Homo sapiens
gctttttaaaactgttttattaacttcacaatatataatgagcatctttccatgcaataggtaaaactctcctgctgacagaaacttacaaactgggtcaaaaacaacattcatttagaagctggtaataggagacccacaagaaataggtaacatcaaaacgtttacgacaaaggtacaccacaaatgtgtaagtttaggaagcaggggtctccctattaacttcagggaaaccatcaggattcagggcataaggcaaaactcatcgtgatggtcatggtgggggggatcagtgctgac

SEQ ID NO: 5179 - DNA, 430 bp, Homo sapiens; identical to SEQ ID NO: 544

SEQ ID NO: 5180 - DNA, 4000 bp, Homo sapiens
gcacgatctgttcctcctgggaagatgcagaggctcatgatgctcctcgccacatcgggcgcctgcctgggcctgctggcagtggcagcagtggcagcagcaggtgctaaccctgcccaacgggacacccacagcctgctgcccacccaccggcgccaaaagagagattggatttggaaccagatgcacattgatgaagagaaaaacacctcacttccccatcatgtaggcaagatcaagtcaagcgtgagtcgcaagaatgccaagtacctgctcaaaggagaatatgtgggcaaggtcttccgggtcgatgcagagacaggagacgtgttcgccattgagaggctggaccgggagaatatctcagagtaccacctcactgctgtcattgtggacaaggacactggtgaaaacctggagactccttccagcttcaccatcaaagttcatgacgtgaacgacaactggcctgtgttcacgcatcggttgttcaatgcgtccgtgcctgagtcgtcggctgtggggacctcagtcatctctgtgacagcagtggatgcagacgaccccactgtgggagaccacgcctctgtcatgtaccaaatcctgaaggggaaagagtattttgccatcgataattctggacgtattatcacaataacgaaaagcttggaccgagagaagcaggccaggtatgagatcgtggtggaagcgcgagatgcccagggcctccggggggactcgggcacggccaccgtgctggtcactctgcaagacatcaatgacaacttccccttcttcacccagaccaagtacacatttgtcgtgcctgaagacacccgtgtgggcacctctgtgggctctctgtttgttgaggacccagatgagccccagaaccggatgaccaagtacagcatcttgcggggcgactaccaggacgctttcaccattgagacaaaccccgcccacaacgagggcatcatcaagcccatgaagcctctggattatgaatacatccagcaatacagcttcatcgtcgaggccacagaccccaccatcgacctccgatacatgagccctcccgcgggaaacagagcccaggtcattatcaacatcacagatgtggacgagccccccattttccagcagcctttctaccacttccagctgaaggaaaaccagaagaagcctctgattggcacagtgctggccatggaccctgatgcggctaggcatagcattggatactccatccgcaggaccagtgacaagggccagttcttccgagtcacaaaaaagggggacatttacaatgagaaagaactggacagagaagtctacccctggtataacctgactgtggaggccaaagaactggattccactggaacccccacaggaaaagaatccattgtgcaagtccacattgaagttttggatgagaatgacaatgccccggagtttgccaagccctaccagcccaaagtgtgtgagaacgctgtccatggccagctggtcctgcagatctccgcaatagacaaggacataacaccacgaaacgtgaagttcaaattcaccttgaatactgagaacaactttaccctcacggataatcacgataacacggccaacatcacagtcaagtatgggcagtttgaccgggagcataccaaggtccacttcctacccgtggtcatctcagacaatgggatgccaagtcgcacgggcaccagcacgctgaccgtggccgtgtgcaagtgcaacgagcagggcgagttcaccttctgcgaggatatggccgcccaggtgggcgtgagcatccaggcagtggtagccatcttactctgcatcctcaccatcacagtgatcaccctgctcatcttcctgcggcggcggctccggaagcaggcccgcgcgcacggcaagagcgtgccggagatccacgagcagctggtcacctacgacgaggagggcggcggcgagatggacaccaccagctacgatgtgtcggtgctcaactcggtgcgccgcggcggggccaagcccccgcggcccgcgctggacgcccggccttccctctatgcgcaggtgcagaagccaccgaggcacgcgcctggggcacacggagggcccggggagatggcagccatgatcgaggtgaagaaggacgaggcggaccacgacggcgacggccccccctacgacacgctgcacatctacggctacgagggctccgagtccatagccgagtccctcagctccctgggcaccgactcatccgactctgacgtggattacgacttccttaacgactggggacccaggtttaagatgctggctgagctgtacggctcggacccccgggaggagctgctgtattaggcggccgaggtcactctgggcctggggacccaaaccccctgcagcccaggccagtcagactccaggcaccacagcctccaaaaatggcagtgactccccagcccagcaccccttcctcgtgggtcccagagacctcatcagccttgggatagcaaactccaggttcctgaaatatccaggaatatatgtcagtgatgactattctcaaatgctggcaaatccaggctggtgttctgtctgggctcagacatccacataaccctgtcacccacagaccgccgtctaactcaaagacttcctctggctccccaaggctgcaaagcaaaacagactgtgtttaactgctgcagggtctttttctagggtccctgaacgccctggtaaggctggtgaggtcctggtgcctatctgcctggaggcaaaggcctggacagcttgacttgtggggcaggattctctgcagcccattcccaagggagactgaccatcatgccctctctcgggagccctagccctgctccaactccatactccactccaagtgccccaccactccccaacccctctccaggcctgtcaagagggaggaaggggccccatggcagctcctgaccttgggtcctgaagtgacctcactggcctgccatgccagtaactgtgctgtactgagcactgaaccacattcagggaaatgcttattaaaccttgaagcaactgtgaattcattctggaggggcagtggagatcaggagtgacagatcacagggtgagggccacctccacacccaccccctctggagaaggcctggaagagctgagaccttgctttgagactcctcagcacccctccagttttgcctgagaaggggcagatgttcccggagatcagaagacgtctccccttctctgcctcacctggtcgccaatccatgctctctttcttttctctgtctactccttatcccttggtttagaggaacccaagatgtggcctttagcaaaactgacaatgtccaaacccactcatgactgcatgacggagccgagcatgtgtctttacacctcgctgttgtcacatctcagggaactgaccctcaggcacaccttgcagaaggaaggccctgccctgcccaacctctgtggtcacccatgcatcattccactggaacgtttcactgcaaacacaccttggagaagtggcatcagtcaacagagaggggcagggaaggagacaccaagctcacccttcgtcatggaccgaggttcccactctggcaaagcccctcacactgcaagggattgtagataacactgacttgtttgttttaaccaataactagcttcttataatgatttttttactaatgatacttacaagtttctagctctcacagacatatagaataagggtttttgcataataagcaggttgttatttaggttaacaatattaattcaggttttttagttggaaaaacaattcctgtaaccttctattttctataattgtagtaattgctctacagataatgtctatatattggccaaactggtgcatgacaagtactgtatttttttatacctaaataaagaaaaatctttagcctgggcaacaaaaaaa

SEQ ID NO: 5181 - DNA, 616 bp, Homo sapiens
  misc_feature (1)..(616): n=a,t,g or c
cagagcaaatgttttattaacagatttttctccagtagtcttgaaaatctcccctgggggagaaaactggcaaaagggggcctgagggttgttggaagaaatgaaaagtacataggatgctattttgaaaaactgatttgtcagaagccactttattttaacaataatgtgactgcacctggcacatgagacaggctctgggcctgtttctcaatgttgtgaaaagcaggacagtcagttcccatggagtagattacagcgtgttggacaaggacattcccccgcgtgaaggcacactccatggagccagtggggccaccattcacggtgtgcaagctgtggccttggagagaacatgggcagggcttccccagcctctactataccccagctttactccattgatcacaacaatgggcacttttttctttggtgcaaatatttccattttccaattgagcctagactttgattttataaaaggaaaagagaatatctatatatgtaaatatctgcatgtgagtgtatgtgtatatatatatatataagtatatacgctttatagataaaatattatggttgcagagcntccaattttgtaaaanaccgtttacta

SEQ ID NO: 5182 - DNA, 228 bp, Homo sapiens
  misc_feature (1)..(228): n=a,t,g or c
aaaataaacagacatttatttccagacttatcttttacataagttaaatacacatttgtctgaggcactgaaacattcacatacacaacccaaattcccaggntttgtcagcagancaatgttaataacaaatcaagtttttttttaaaaaaaacagtgaacagtgttttatacaagcatattgactatttctttcttaaccttaaacattctaaacgtaaaattgta

SEQ ID NO: 5183 - DNA, 245 bp, Homo sapiens
ctttattaaaaccttagcatgtctccctgatctgaactatttgctttctcttcaagataagttgtattttaccatggaaaaatacagtatctaacattaccattcacgttaaatgaagtttcctcataacatttatctttagttttatgaagtcatcgtgaccaatgttacagtaatttctgttagctgattgtggtaaacaatgtttaatgtgaaaagaaattaaaactttcttcatctgttgt

SEQ ID NO: 5184 - DNA, 449 bp, Homo sapiens
  misc_feature (1)..(449): n=a,t,g or c
aattaccaagacatttattagttgtcaaaaagctttacaatcagtttcatgatcagaaaatagagcaaaatttcaatattgttttctttataaaattgatgaatttctgaaaagataaaggatcatttgatttttaaaaatgtcagcttcatcacatgatgttccagagatctgaccccaaaagcttctcaagttttactatccatagtgtccttatttgtaactgagacccatccgttattttccatctgangcttcttcaggcagtttataacaaagtgaaagaagttgggactaagagagccatcatgggatcttgtcttcggtaatacacttggtcaacctttaggaaatactttattctgncaaggaaggtcttaggttactgtcngggagcngggtnggctagggggattaggntgtttatttccngggggangcctaaggct

SEQ ID NO: 5185 - DNA, 417 bp, Homo sapiens
  misc_feature (1)..(417): n=a,t,g or c
gatattctaagacaaaaaaatggttaatcttcagattaataaattaggtcattataataataaattaattttttttaaagttcagcaacctctgtccaagtatttacaacaatacttgaaagttcctttacaaaacagaacacattttcttttcacgttaagcatactgggtatctgtgtctttcacaacaagcatttttaaaagaaaactcaatgcacaaatgggttaattagtataaaagtgctaagggctgtttgaaaagttaccactatagtatacagtcagttatatttgaggcatactacaacaaacttccagcttattgtggacaatattccagtagttgtttcaaaccattgtttgaaaaaaaaaaaaaaaaatccnggagctgattagtgatgcagataagaactgcc

SEQ ID NO: 5186 - DNA, 349 bp, Homo sapiens
  misc_feature (1)..(349): n=a,t,g or c
gaccatgcaannttctnaatgtatattggtctgggaacttaaagatggaaacagagaatacatagggagctatgcaacacaccaagggccagtatccacaataataataacagtgacaacagcantantaatatacaatgctataagattattaaaatctattctataatgcacagagaagtacctgcttgaagccattaaatatatgacagggtctgtcttcagtgcaacatatcaantttgggcanttgaaggggtntatcaaatatatatttttnggctttcaaaatgtgggggccaaactaaantttagggcttttcnggataaaccnttaaaanttttaatcgg

SEQ ID NO: 5187 - DNA, 482 bp, Homo sapiens; identical to SEQ ID NO: 3337

SEQ ID NO: 5188 - DNA, 439 bp, Homo sapiens
  misc_feature (1)..(439): n=a,t,g or c
tgacatttnnataaaaatttattgaaatttcagtgatgttttaaagagagggggaaaaatacagaaaaccaaagaacccatcaacaactataacacaaaatataccttcatgaatttgtctttaaaccatctctcagcacctgacttttgaactgtgaatatatctctataggcaggcaccaattcaaaacaccgatactgacaacagtagtaaattccacttcgttttgaggaaatcagagactagcaaatacaaataacaaaagnaaanttaaaaagtcaaaccgcagcctctgccctcccccctccccacagcaatctcaggttatattttaagggnatttggaagtgggngctgggnaagtgggcactccttccccccaattttgggnggaaaatagggggaataggcacttttccccccnctttttgggggcca

SEQ ID NO: 5189 - DNA, 698 bp, Homo sapiens; identical to SEQ ID NO: 795
  misc_feature (1)..(698): n=a,t,g or c

SEQ ID NO: 5190 - DNA, 421 bp, Homo sapiens
  misc_feature (1)..(421): n=a,t,g or c
gtaggtcagagacagctggatcagctccagccacatttattacaaaatagtgaccgcagttctggtatagaaaagatccctgacagcccagtacacctgcaacggcccccaccccacagagttcctctctcaggtgcctcaggtgtggaagttctcagattcgaaggtttcctgccaggagggcgctgtaccgggcagttgtgaggggcaggtaggcacctacagcctggtccagaacgtacagtgggtcagacagggtgctggggtcgaagccctcatttgccatccgaactttctgctgtttgaaggtctctgtggtggccaaagactcctggagcctgaggaatcggggccgggcataaggtggcaagttctcagacangtnggtgtagagctgcataaggtccaaagcgttgggggg

SEQ ID NO: 5191 - DNA, 257 bp, Homo sapiens
  misc_feature (1)..(257): n=a,t,g or c
antttcggcacngaacccctgcggtgcacgnctccctggacaagttcctggcttctgtgagcaccgtgctgacctccctacccctccttctaactttattgctgtattctcttcactctatatttctctctatttgctaatattgcattgctgttacaataaaaattcaataaagatttagtggttaagtgcaaaaaaaaaaaaaaaaaaaaaaaaaaaaaaaaaaaaaaaaaaaaaaaaaaanaaaanaaaaaaaa

SEQ ID NO: 5192 - DNA, 592 bp, Homo sapiens
  misc_feature (1)..(592): n=a,t,g or c
ttttttttttcataaatatttatattttttaatgaaatacacaccaaaaaaaagcacacatgcagataattcacaaacaatcaaatccttgggaaaggctctgcatttgttcaacaaggtcaagtgtcattaggagcacagaacaaccgaatgtaaaatttctttccaggagctttccacgtggttggaataaacacaatttagaccatgcaaaactcttaatgtatattggtctgggaacttaaagatggaaacagagaatacatagggagctatgcaacacaccaagggccagtatccacaataataataacagtgacaacagcaataataatatacaatgctataagattattaaaatctattctataatgcacagagaagtacctgcttgaagccattaaatatatgacagggtctgtctcagtgcaacatatcaaatttggcaattgaagggtatatccaatatatattttttgcttcaaaatgtggaacaaactaaaatataaggctttctgataaactataaaaatttaatcagcattggatctaatgactatcttataatactcctctgcagtacttcnctagt

SEQ ID NO: 5193 - DNA, 143 bp, Homo sapiens
gcaggctagaaaataattttaatgcaaagtagaaagtatcaatccacctcatcactttccttgctctctctctgtcacctcctctttcctgtggctctgaggaggtgggagaagcaggcagtatttccacagcagctgtccat

SEQ ID NO: 5194 - DNA, 447 bp, Homo sapiens; identical to SEQ ID NO: 750

SEQ ID NO: 5195 - DNA, 400 bp, Homo sapiens
ttttttttttttttttttttttttttttttttttttttttttgggaagaagccttggtttaattcgctctgtggggacactgttccgttcagaggcccctcccagccatggggtgggggacagtggtgggcgtgggaatcccagcgagcatcctggagggtgcgtcgtctccatgtattttgctcttccccatcttttccatggggtcccctgccagggtcaagcactaatatgtggtgaaggcagcaaacagcgtcggcgtccctttaggggtggggaaagggctgtagcaccaagaaccccctcccccgcccacgacatccctgaaaaggagactaaaataaagccccggggcctttctacgtaggggctccacttaaatatggaatggtggtaggca

SEQ ID NO: 5196 - DNA, 370 bp, Homo sapiens; identical to SEQ ID NO: 769
  misc_feature (1)..(370): n=a,t,g or c

SEQ ID NO: 5197 - DNA, 270 bp, Homo sapiens
gcagaatatatggctgtagatccatttttaatggttcatttcctttatggtcatataactgcacagctgaagatgaaaggggaaaataaatgaaaattttacttttcgatgccaatgatacattgcactaaactgatggaagaagttatccaaagtactgtataacatcttgtttattatttaatgttttctaaaataaaaaatgttagtggttttccaaatggcctaataaaaacaattwtttgtaaataaaacactgttagtaattcc

SEQ ID NO: 5198 - DNA, 267 bp, Homo sapiens; identical to SEQ ID NO: 3420

SEQ ID NO: 5199 - DNA, 457 bp, Homo sapiens; identical to SEQ ID NO: 99
  misc_feature (1)..(457): n=a,t,g or c

SEQ ID NO: 5200 - DNA, 431 bp, Homo sapiens
ctaaccaaagatatatctttggaagaaaatattaatgtataccaagcacaccttatttgtatcaattgagatgttgattaccaattaagtggttttaaacccttatttaatttgaagaagagcagcaatatacattacaatatttgggtacactttatttttatatgggttaacattctgctatatttcatttcattcgttttgagaaactgaaaacaaagggaaatcaagggtaatcggtaggtgatttgagggaaatttccaaccaatatgtgagtcttgcagtatttcattatacagccctttcttcccattatttatttttttgcaaataagtcattttgacccaaatccagcataaatagcttttcaccaattcctaacttaagacaactaaaatttacaatcatgtggcagtataaattttaaaa

SEQ ID NO: 5201 - DNA, 523 bp, Homo sapiens; identical to SEQ ID NO: 3367
  misc_feature (1)..(523): n=a,t,g or c

SEQ ID NO: 5202 - DNA, 421 bp, Homo sapiens
caaaagggtgtttactatttggccaaacaatattttttaattgtcagtcataaagtgaaatacatactaaaatatatattaaatattcaccaaatctgcattgctgctacatgaaaacattttttggtctgttggaaaatgtaattcctgagatcattgttgggctttgtcaatcattttcctcaccatcaaatcaccttaagtgacttgggagtgtgaatctaggatgttcaattttagaccaattttctctatcttctaaatgagtaaacaggctctgtcttttataaaaggtagaaaaataaccatggtgtgctaatttttttcaaggtataccatatggaaaagtataggctgaacacaaaggaagtcttttctgaatggctctcaatcacacataaggaacatatgttttccagtt

SEQ ID NO: 5203 - DNA, 247 bp, Homo sapiens
  misc_feature (1)..(247): n=a,t,g or c
catgccttgaggaaagctatttatttccaagatatagactgtacttttaagacaggacttttcagaagcaggaaattttagttgttgccagagaggtgtgtcaaggacacagtgaaaggagccatgcggacatggggtggaaggctttntccaacactgttacaacacttttgtaaatgagcaaaacatctttaaaaatccttataaattctttataatatgttacacatttagagacaatatttac

SEQ ID NO: 5204 - DNA, 622 bp, Homo sapiens
ggcacgagctcgtgccggccttcagttgtttcgggacgcgccgagcttcgccgctcttccagcggctccgctgccagagctagcccgagcccggttctggggcgaaaatgcctgcccttcacatcgaagatttgccagagaaggaaaaactgaaaatggaagttgagcagcttcgcaaagaagtgaagttgcagagacaacaagtgtctaaatgttctgaagaaataaagaactatattgaagaacgttctggagaggatcctctagtaaagggaattccagaagacaagaacccctttaaagaaaaaggcagctgtgttatttcataaataacttgggagaaactgcatcctaagtggaagaactagtttgttttagttttcccagataaaaccaacatgctttttaaggaaggaagaatgaaattaaaaggagactttcttaagcaccatatagatagggttatgtataaaagcatatgtgctactcatctttgctcactatgcagtcttttttaagagagcagagagtatcagatgtacaattatggaaataagaacattacttgagcatgacacttctttcagtatattgcttgatgcttcaaataaagttttgtctt

SEQ ID NO: 5205 - DNA, 5421 bp, Homo sapiens
ccgggatccggttttttttgtttttaaaagtgtaatttcctttttatttgcatctgtttatgactgaaaaaaatgactagttattatgaagacactactgttgaagatggatattttaacatggagtttcaacaaaattacttcttgagacagagctgatgtgttttttaaataacgtgattttaagcatatatttgaacaaaactaaaacatttagtattatgaatatgaaaaaagatcagtaaatcaatgtactcttctaggctgaattaaggtagactatttaaggtttcaaaaaagtttggctggggcagaataagttttacaaaacccatgccatccaaaattaagatgacatgtagcagcaagaagtattccaatgtctcataaccagttctcgcaagcaatgtgtattccttactttaaggaagtgtcaaacaaatagaaaaatctggaagaatttactaagtgtaataaattagaggtaaatcgtaataaaagaatttatgtctcacaaaaatattcacaagtgggagttttcttttaccaacttctcagagtccttctagccccctcttcacttctgaaagatgggatttaccaaaatctggtttacatttaacttttcagggacacatgacctgaaaagaaagatgtcagataatactgacattgcctcatgcactttctttgtatcagtccttcttctgtaagtaatcagaattgggtccaaatggcatagaatcaaacattatgtatcatgccaaataccacttcctgcccaacaaaatttcatctttctccagtaatgaagaggtggacattcttgttggactgtagcatctgtgccgcccgctccacaccaaccacggcagctaacctctgggcatcatatttggagtagagaacagtgcaggtccacgtggcctcttctcctctgttggtggctctcagcatattacagatttcactgtaaaagtgtggatatgtcggcagttcatagaaaatcaggttcctgatgccttttattgctgtagtttatttccacccccttccctcctgttttctctctctccttctctctctctctctctctctcttttttttccgccctagctggggctgtgttggaggagaggaagaaagagagacagaggattgcattcatccgttacgttcttgaaatttcctaatagcaagaccagcgaagcggttgcacccttttcaatcttgcaaaggaaaaaaacaaaacaaaacaaaaaaaacccaagtccccttcccggcagtttttgccttaaagctgccctcttgaaattaattttttcccaggagagagatgtcttatcaggggaagaaaaatattccacgcatcacgagcgatcgtcttctgatcaaaggaggtaaaattgttaatgatgaccagtcgttctatgcagacatatacatggaagatgggttgatcaagcaaataggagaaaatctgattgtgccaggaggagtgaagaccatcgaggcccactcccggatggtgatccccggaggaattgacgtccacactcgtttccagatgcctgatcagggaatgacgtctgctgatgatttcttccaaggaaccaaggcggccctggctgggggaaccactatgatcattgaccacgttgttcctgagcctgggacaagcctgctcgctgcctttgaccagtggagggaatgggccgacagcaagtcctgctgtgactactctctgcatgtggacatcagcgagtggcataagggcatccaggaggagatggaagcgcttgtgaaggatcacggggtaaattccttcctcgtgtacatggctttcaaagatcgcttccagctaacggattgccagatttatgaagtactgagtgtgatccgggatattggcgccatagcccaagtccacgcagaaaatggcgacatcattgcagaggagcagcagaggatcctggatctgggcatcacgggccccgagggacatgtgctgagccgacctgaggaggtcgaggccgaagccgtgaatcgtgccatcaccatcgccaaccagaccaactgcccgctgtatatcaccaaggtgatgagcaaaagctctgctgaggtcatcgcccaggcacggaagaagggaactgtggtgtatggcgagcccatcactgccagcttgggaacggacggctcccattactggagcaagaactgggccaaggctgctgcctttgtcacctccccacccttgagccctgatccaaccactccagactttctcaactccttgctgtcctgtggagacctccaggtcacgggcagtgcccattgcacgtttaacactgcccagaaggctgtaggaaaggacaacttcaccctgattccggagggcaccaatggcactgaggagcggatgtccgtcatctgggacaaggctgtggtcactgggaagatggatgagaaccagtttgtggctgtgaccagcaccaatgcagccaaagtcttcaacctttacccccggaaaggccgcattgctgtgggatccgatgccgacctggtcatctgggaccccgacagcgttaaaaccatctctgccaagacacacaacagctctctcgagtacaacatctttgaaggcatggagtgccgcggctccccactggtggtcatcagccaggggaagattgtcctggaggacggcaccctgcatgtcaccgaaggctctggacgctacattccccggaagcccttccctgattttgtttacaagcgtatcaaggcaaggagcaggctggctgagctgagaggggttcctcgtggcctgtatgacggacctgtgtgtgaagtgtctgtgacgcccaagacagtcactccagcctcctcggccaagacgtctcctgccaagcagcaggccccacctgtccggaacctgcaccagtctggattcagtttgtctggtgctcagattgatgacaacattccccgccgcaccacccagcgtatcgtggcgccccccggtggccgtgccaacatcaccagcctgggctagagctcctgggctgtgcgtccactggggactggggatgggacacctgaggacattctgagacttctttcttccttccttttttttttttgtttttttttttaagagcctgtgatagttactgtggagcagccagttcatggggtcccccttgggcccacaccccgtctctcaccaagagttactgattttgctcatccacttccctacacatctatgggtatcacacccaagactacccaccaagctcatacagggaaccacacccaacacttagacatgcgaacaagcagcccccagcgagggtctccttcgccttcaacctcctagtgtctgttagcattccttttcatggggggagggaagataaagtgaattgcccagagctgcctttttcttttctttttaaaaattttaagaagttttccttgtggggctggggaggggccggggtcagggagagtctttttttttttttttttaaatactaaattggaacatttaattccatattaatacaaggggtttgaactggacatcctaatgatgcaattacgtcatcacccagctgattccgggtggttggcaaactcatcgtgtctgtcctgagaggctccacaatgcccacccgcatcgccattctgtagtcttcagggtcagctgttgataaaggggcaggcttgcgttattggcctagattttgctgcagattaaatcctttgaggattctcttctcttttaccatttttctgcgtgctctcactctctctttctctctctagctttttaattcatgaatattttcgtgtctgtctctctctctctctgtgtttcctccagcccttgtctcggagacggtgttttcctcccttgccccattatcttttcacctcccaggtctacatttcatggtggtcgttgggtccgcctaaaggatttgagcgtttgccattgcaagcatagtgctgtgtcatcctggtccatgtaggactggtgctaaccacctgccatcatgaggatgtgtgctagagtgtgggaccctggccaagtgcaggaatgggccatgccgtctcacccacagtatcacacgtggaaccgcagacagggcccagaagctttagaggtatgaggctgcagaaccggagagattttcctctgtgcagtgctctctggctaaagtcacggtcaaacctaaacaccgagcctcattaacccaagtgaaccaaccaaagtcaccagttcagaagtgctaagctaataggagtctgacccgagggcctgctgcttcctggttaagtatcttttgagattctagaacacatgggagctttttattttcggggaaaaaccgtatttttttcttgtccaattatttctaaagacacactacatagaaagaggccctataaactcaaaaagtcattgggaaacttaaagtctattctactttgccaagaggagaaatgtgttttatgaacgatagatcacatcagaactcctgtggggaggaaaccttataaattaaacacatggcccccttagagaccacaggcgatgtctgtctccatccttccctctccttttctgtcacctttccccctagctggctcctttggacctacccctgtccttgctgacttgtgttgcattgtattccaaacgtgtttacaggttctcttaagcaatgttgtatttgcaggcttttctgaataccaaatctgctttttgtaaagcgtaaaaacatcacaaagtaggtcattccatcaccacccttgtctctctacacattttgcctttggggatctggttggggttttgggttttttgttgttgttgtttatttgttattttaaaggtaaattgcacttttaaaaaaataattggttgacttaatatatttgctttttttctcacctgcacttagaggaaatttgaacaagttggaaaaaaacaatttttgtttcaattctaagaaacacttgcagctctagtattcacttgagtcttcctgtttttcctgtaccgggtcatggtaatttttggttgttttggttgttttcttaaaaaacaagttaaaacctgacgatttctgcagtgacttgatgctctaaaacagtgtaggatttaagaatagatggtttttaatcctggaaattgtgattgtgacccatgagtggaggaactttcagttctaaagctgataaagtgtgtagccagaagagtactttttttttgtaaccactgtcttgatggcaaaataattatggtaaaaaacaagtctcgtgtttattattccttaagaactctgtgttatattaccatggaacgcctaataaagcaaaatgtggttgtttcaaaaaaaaaaaaaa

SEQ ID NO: 5206 - DNA, 349 bp, Homo sapiens
tttcaggtaacaaagtccagtctgttttatttttaacccaaatattccaaatatacagaaaattaccagtacaaagttaaacacattcagatttatttacacaatgctaaagaaatttgagttttatttccattttgtggaattttatcatggggtctggctttaatgtgtaactgacgtgggtcactgaaactcgattatcccacctcacatgcaattttctgtcctaagggaatagaaaacttgggtttttagggcacatgcagtaatgatcttaatactgctttacactttcgtgggaaggcagctgtcccacagcctggggaaggaccacatgctcagaaagggg

SEQ ID NO: 5207 - DNA, 378 bp, Homo sapiens
tttttttttttttttttttttttttttgtgtttaagagtttattaggataggcacataacagaaagctcaaaggacaacaaagctgcaccttcctaaaggctgaccctcaaagcaccattttgttagaactcagaggagaagctcgatctctgagccttccctcctcacagtttgggaaacatgcacaggatgaaggtaaatcctgcatagaaatcttgtaattccagaattagtcaaacaaatttgaaatacacacatttaaaaatacttacattctcatttagcgttcatgaagtgattactgacatttacaattacatctgacatcacagagcaagcctttgcagggatctaattcaagcttaagccaaatctat

SEQ ID NO: 5208 - DNA, 250 bp, Homo sapiens
cggggatttcccaatgattttattgaggtaacttttcccaattttatacatatatgcatttatatatacttaggaaagctaaacaatgttctaaggcacttggaattgtgcacagcaaagtatcctctaatattatacaactaaatagagcagaattttgctttttaaataacacaaataccagtacggaattaaaaaagggaatacatagtctttctttcaggttacaatagtggaatacaagtacata

SEQ ID NO: 5209 - DNA, 429 bp, Homo sapiens; identical to SEQ ID NO: 3338

SEQ ID NO: 5210 - DNA, 1486 bp, Homo sapiens; identical to SEQ ID NO: 703

SEQ ID NO: 5211 - DNA, 327 bp, Homo sapiens
ttttttgaaaggtaagtaccattttatttagtgttgtaggaaatgttgggttacttcttaaaaacgaaaccaaagaaattcaaaagtcccaaagaaagaaagcaggaaataataattctataatccaaaaacgttgggcgatccttcagttggaggaagagggcgtcagttaagtagctcacacagtagatatggagacaccatatggagatacggagttaagtttggtggatactaggaattaagttctccacctaaggcaattaatttttcagccttgagagataattagtagttctagaaaaagaaaaaaagttgactgggaga

SEQ ID NO: 5212 - DNA, 406 bp, Homo sapiens
atgaaaacagagatctaaaaatttaatgatttaaaaatagcctctacatacaagatggcaaagagtaatacagattgaacatttggttttaaaaatgtgaaatgtctccacttagcgtagatcaatcaagtcagccatctcctaagaaatacacattatacaatgaaatctacaaagacacactttttaacttcaagcgttgttgattttcagcaaccctcttcccacatgaacatttccttgtaatgtaatgtatgacttttaatcttcttttggcagagtaggactttgagaattataatagcagttgttttgaaaagcaccttctatgatcatttatttccactgatttttttttaatcacgctgagatcatgcattcttgttttttaaatccttttctgttc

SEQ ID NO: 5213 - DNA, 194 bp, Homo sapiens; identical to SEQ ID NO: 4595
  misc_feature (1)..(194): n=a,t,g or c

SEQ ID NO: 5214 - DNA, 322 bp, Homo sapiens
  misc_feature (1)..(322): n=a,t,g or c
ntntctgtttaagtcatttatttcaatacaggcattgttttaaatttgcaccttgtctttaacacatttcataaccagagaacaggtctgagaacaagtacataaaaggattatttgacaaagttttaacaaaagtgcttacagcttatttgtttcagatatacagaactgccagtcacaaagagccactaagtgnaaatacagccacaaacttgcctggggaagtaaaatattttacatatttacactgtacatttaaatggggatattctgaaggcattattattatcaataaactctaaggcaggaggttctcttaaac

SEQ ID NO: 5215 - DNA, 446 bp, Homo sapiens; identical to SEQ ID NO: 3463

SEQ ID NO: 5216 - DNA, 492 bp, Homo sapiens
  misc_feature (1)..(492): n=a,t,g or c
tttaaaactttttctctgcattttattttaagaaaacacaaacctggtcacaaaacatctttcagagaacaggataagtgaagaaacaaacaaaatgcacgggaatagcaaatttggggccacggtcatgttcaaggggcggctgacatgacatcattttgttcccggaaaagcaaggttaactcaagctgtgaagccagatggccaatagatttacagccatctaaagaagagcagaatctctccaagagctgaattatgatgacttgtaggtattgattagatgagaacaccaaccccatattcagcagagagttaggggaatgagaagtagaggggagatgggtgggtnggagatcgtctttatgtagttttcaaagtcacttcccgaaaaagaggatgagggtaattagttgaatatgcccagccacggacntgagggaccgggaggagtttgatgcgtttncccaatttttagccngggggttctct

SEQ ID NO: 5217 - DNA, 459 bp, Homo sapiens; identical to SEQ ID NO: 3324
  misc_feature (1)..(459): n=a,t,g or c

SEQ ID NO: 5218 - DNA, 458 bp, Homo sapiens
  misc_feature (1)..(458): n=a,t,g or c
tttttttttttcccctaaatggtaggatttatttcaatgctcacatacaattgaatgagacaaactatttacataaaacataagtacaaaaaatataatacaatttatactgtacacaatcaggattcccttgttttgttccccccacaaatcggcagctagagatggtaagaagggggttggtaggaaagtgtgactgcacactcagcagtgctgaggatagatcttcagaatgctttttcataaagatgaatagggttgagatacagaaactgtcaatgcaccaagagcagtaagagagcacaacatattcacttctgtaataatagctatatattttttcttataaacgtgtttgtttctcaaagctgaggcttggagcaggtgtgagttgccttccattgattggttaggtgacctccgcccanccctgctccaacttccatagttgatccaat

SEQ ID NO: 5219 - DNA, 510 bp, Homo sapiens
ttttgtattcattgctttatttgtccttttcacgggtcactacattttagggcatttgatctataattggtagaacaggtttcaggcagggaggataggagcatcatcttccatccccatccacctccgctctttatcttgatgtcacaccaagtgtgatagcgcctccagcagtttcttcacagcttcagaagcctctggtcccagctcatttacacacttccttagcccctccacaaggtgctcaaagaaatgcccagagttttcagaagaagctttaatggatccataaagggaagaatgttgtccagaggtaaaggtgccaacttgtcaacaggaaggggcactttgttgatgaggaaggcagtagcagagtaactacaaaggctgatggtcaccagcaggaagatagttaccagcttccatgacagttactggggatatttttcaggagtttaaaaatcagaaaaactagcaaaatccaccaagcccagtggttccccccgtgcc

SEQ ID NO: 5220 - DNA, 405 bp, Homo sapiens; identical to SEQ ID NO: 4280
  misc_feature (1)..(405): n=a,t,g or c

SEQ ID NO: 5221 - DNA, 327 bp, Homo sapiens
ttttttgaaaatgatattaattttattgcatcattttactgactagaacgccagacttagagtggatataagtataaaaataaccaaattcttacaaataatactttgctgctacagtactgaataattagtggaggttgcaattataatacaactttaaataacattctcataatgggtttaacacaatcaaccaggggctaaggtttaaaggtttacaaagagaaatccaggacaacatgaaaactcccaaagttcatattccagctaaatgcttcatttaaccgtcaatccaccaacacaaacattaacaaaactcagagcaac

SEQ ID NO: 5222 - DNA, 422 bp, Homo sapiens
gcacagtcttacatattccagtcaaggtctatgaatacagaccctcaacaaacaggaagcagctttaaaaatgtatcaaattgctatagtcaattcctacactccagcttgtagttttctttgtttcaggattagacacagaacccattcttcaaggactcggcaaaagttctagaaacaaacaccatggtggtggaagcggttgcgttgcttcagtgatcacctagatttggtgtctttggtttcagtgttctggttactgaaggaatcccggatctttacaacttcagctgcacacaaatgtccaaaagattttgtgtaccattctggcatgtggccccttaaagtcaactctgcacatgtaggtgagtttggattttcctggcccacagggttcaatcaaatacctgggacaaagagca

SEQ ID NO: 5223 - DNA, 380 bp, Homo sapiens
gtatagagtaaaatttattatagggttgtagaattcatacaacctaaactccttacagcattcagcacctacacaattttgtgcattccaaatacagatagtagtgagaaagaatcactgcattagttaaaaatgactgtctcatgaaaattcgttcacatataagtcaggttaattacagagcacctaacagaactgcaaagatgtaatttctaaattcaagaaagttgtacaaaatgaaaaacaaaagaaaccaacaatgttgagatctgatatattttacacaaaaagttcaaaaacaatttaaaatatttcaaattttaaaattgctccaccataagatgaataaagagcttacttaaaggaaaagaaaaaaggaa

SEQ ID NO: 5224 - DNA, 340 bp, Homo sapiens; identical to SEQ ID NO: 3329
  misc_feature (1)..(340): n=a,t,g or c

SEQ ID NO: 5225 - DNA, 202 bp, Homo sapiens
  misc_feature (1)..(202): n=a,t,g or c
gatccacctcatatgtgagtccgtccaaaagatgttactgctctgggtgggccagtgcttctatatcggttatactaacttncatttaaagtatttattctaaaatgcctctgagaaacagtaaaaaataaaaacaacaagttgtctaaaatgcaacagcttttatagtaaatgtacatttataaataaaatactcaaatca

SEQ ID NO: 5226 - DNA, 308 bp, Homo sapiens; identical to SEQ ID NO: 643

SEQ ID NO: 5227 - DNA, 258 bp, Homo sapiens; identical to SEQ ID NO: 3501
  misc_feature (1)..(258): n=a,t,g or c

SEQ ID NO: 5228 - DNA, 374 bp, Homo sapiens
  misc_feature (1)..(374): n=a,t,g or c
atgangcactccaagtgccatatatctattttattcttcaggaaattatatttttcttttacaagagcacaacaggaaccaaagtaaaagagtaatagatacagcactcaggataaatcatatctttaaaataataataaaaaaatttacaccttgtcctatatcctgttagtattttcataatatggccatgattgaaaaaacaaaaagcaagcatctacaattttttttgataaagactttttatgccaggaatggattaattaccaacaaaatttatactaatcaggctgatgtcaatctatttttgtaatgtatcattaacaaatttattttggaaaagataaaaatattgctccttgataataaatcnt

SEQ ID NO: 5229 - DNA, 366 bp, Homo sapiens
aatttaacaagttgatatatatatatatatatatatatattatcaagtataacacagtcatacaaaaacatttagtagaaatataattcacacataaaaacagtctacttattttttgtcccttttatatcctattttaggcaaaatgataaaacccagaaaataacaggaatgtactagtcctaaaaactggaccttttataaatgaaacagatccgatcacctataccttctctcaaattccaaataatgaggcttactgacctgtactctcagaatcaacttaaatacattttagcttgatttggatgaaatatgtactttcagttgttgacaatccaggtagaacaagtacataaaatgatt

SEQ ID NO: 5230 - DNA, 318 bp, Homo sapiens
  misc_feature (1)..(318): n=a,t,g or c
aaattttagaatattttaatgtccatttcttcagtgaatgcattttgaaattattagaattaacaatttaaaaagagcagataaaaggatatatggaaaatgcaaacagtcggttcttgctaattcaatttcagattctaggcatgatgtgattttccaaacaaccaattaaaaaaaactccttacctcgaaaatctagaaattcaaatgcagacgtgtctttggaaactacaaatgattacagcccatgtgacaggaagcacgcggccttcggctctccggntcgtgtgcaaatgtgcagggggagcccccgcgggt

SEQ ID NO: 5231 - DNA, 406 bp, Homo sapiens; identical to SEQ ID NO: 2834

SEQ ID NO: 5232 - DNA, 2808 bp, Homo sapiens; identical to SEQ ID NO: 822

SEQ ID NO: 5233 - DNA, 228 bp, Homo sapiens; identical to SEQ ID NO: 735

SEQ ID NO: 5234 - DNA, 224 bp, Homo sapiens; identical to SEQ ID NO: 660

SEQ ID NO: 5235 - DNA, 434 bp, Homo sapiens
  misc_feature (1)..(434): n=a,t,g or c
ttttttttttttttttttactttgttctttcttttttatttagtcacaacacatcagtacaacagaggtcaaacccagttcagtggaggtcgtttaactacacctgctaaaagaataaacctgaaaaatgatattttatagcccaaatcaaattaaataaatcaaagagaaggaggcaggaaagcccttttaaataccttggcaaccacagttccatgcaccaaaaggaaaactcacataaaantttccagttaaaagaaaatatgggcagtcccgggnaaattaggttatgcatttaacagtttccactgtactacttcaattgaccactcggcacaccatgatcacttatccatgtttaacatttgtgaatttgaggatccgtgtgattaaaaaattctttgtgttgctgggggctgggtaaatgcgggcgt

SEQ ID NO: 5236 - DNA, 7621 bp, Homo sapiens; identical to SEQ ID NO: 3334

SEQ ID NO: 5237 - DNA, 3775 bp, Homo sapiens; identical to SEQ ID NO: 698

SEQ ID NO: 5238 - DNA, 407 bp, Homo sapiens
gtcattaatatgatctttaataaacggaataacgcaccattttacagcaagcctttttaaacctaaagaactgccttaaaatctccttctccaatgtctctgtatcaatacaatctttttatttaggtttatatatatcaaagcatttacttacacttattcatagaaaactctttagtggcttaatgtcagctttcatagtggcatccatagataatacaaaagaaaagtgatttgctttattttatactcacactgatccatcaaacacaacttatacagcatagcaaggcttcagacagcttatacaaaagcaaaataactgaaattattcataaagtcatatatgatagtctatctgtaatgtaagagcaaaacacaccaacaaaagatacccgttaacaaga

SEQ ID NO: 5239 - DNA, 515 bp, Homo sapiens; identical to SEQ ID NO: 35

SEQ ID NO: 5240 - DNA, 408 bp, Homo sapiens; identical to SEQ ID NO: 3513

SEQ ID NO: 5241 - DNA, 531 bp, Homo sapiens
tactattaaccattgtatatttatttaaaagccataaagaatacgaaaaagcatgaacgcacaaattccagagaatttgttttttaatcaatccgatcaattttacacaacaaaatatcattaagaaacatagaaatcatgtgaattgtattaaaactatgacatatgacaatattatataaagaaaattttaactctaagagacaaatataattttttaaaaaagaaattaaaaatatcacgtcttatgctaaatatatatagatatatttattatgatgcagcaggttttggaatacagggatttaggcaagttaaaaataaaaagtttatatgcttaaactttctgaatattgtttgtctgatttcctatttaaatatcagacatcattataggaaatacatagtctacttacgattgcaatggcactttcaaatataaggcaattaatattttagaaagcagcaacttttactttttttaaaaaaaaaagctagtagcagcatgtaaaaatgagcattacgagaaac

SEQ ID NO: 5242 - DNA, 7596 bp, Homo sapiens
gtggtcgcggctggggacgtgcgcccgcgccaccatcttcggctgaagaggcaattgcttttggatcgttccatttacaatggcgcagagaactggactcgaggatccagagaggtatctctttgtggacagggctgtcatctacaaccctgccactcaagctgattggacagctaaaaagctagtgtggattccatcagaacgccatggttttgaggcagctagtatcaaagaagaacggggagatgaagttatggtggagttggcagagaatggaaagaaagcaatggtcaacaaagatgatattcagaagatgaacccacctaagttttccaaggtggaggatatggcagaattgacatgcttgaatgaagcttccgttttacataatctgaaggatcgctactattcaggactaatctatacttattctggactcttctgtgtagttataaacccttacaagaatcttccaatttactctgagaatattattgaaatgtacagagggaagaagcgtcatgagatgcctccacacatctatgctatatctgaatctgcttacagatgcatgcttcaagatcgtgaggaccagtcaattctttgcacgggtgagtcaggtgctgggaagacagaaaatacaaagaaagttattcagtaccttgcccatgttgcttcttcacataaaggaagaaaggaccataatattcctggggaacttgaacggcagcttttgcaagcaaatccaattctcgaatcatttggaaatgcgaagactgtgaaaaatgataactcatctcgttttggcaaatttattcggatcaactttgatgtaactggctatatcgttggggccaacattgaaacataccttctggaaaagtctcgtgctgttcgtcaagcaaaagatgaacgtacttttcatatcttttaccagttgttatctggagcaggagaacacctaaagtctgatttgcttcttgaaggatttaataactacaggtttctctccaatggctatattcctattccgggacagcaagacaaagataatttccaggagaccatggaagcaatgcacataatgggcttctcccatgaagagattctgtcaatgcttaaagtagtatcttcagtgctacagtttggaaatatttctttcaaaaaggagagaaatactgatcaagcttccatgccagaaaatacagttgcgcagaagctctgccatcttcttgggatgaatgtgatggagtttactcgggccatcctgactccccggatcaaggtcggccgagactatgtgcaaaaagcccagaccaaagaacaggcagattttgcagtagaagcattggcaaaagctacctatgagcggctctttcgctggctcgttcatcgcatcaataaagctctggataggaccaaacgtcagggagcatctttcattggaatcctggatattgctggatttgaaatttttgagctgaactcctttgaacaactttgcatcaactacaccaatgagaagctgcagcagctgttcaaccacaccatgtttatcctagaacaagaggaataccagcgcgaaggcatcgagtggaacttcatcgatttcgggctggatctgcagccatgcatcgacctaatagagagacctgcgaaccctcctggtgtactggcccttttggatgaagaatgctggttccctaaagccacagataaaacctttgttgaaaaactggttcaagagcaaggttcccactccaagtttcagaaacctcgacaattaaaagacaaagctgatttttgcattatacattatgcagggaaggtggactataaggcagatgagtggctgatgaagaatatggaccccctgaatgacaacgtggccacccttttgcaccagtcatcagacagatttgtggcagagctttggaaagatgtggaccgtatcgtgggtctggatcaagtcactggtatgactgagacagcttttggctccgcatataaaaccaagaagggcatgtttcgtaccgttgggcaactctacaaagaatctctcaccaagctgatggcaactctccgaaacaccaaccctaactttgttcgttgtatcattccaaatcacgagaagagggctggaaaattggatccacacctagtcctagatcagcttcgctgtaatggtgtcctggaagggatccgaatctgtcgccagggcttccctaaccgaatagttttccaggaattcagacagagatatgagatcctaactccaaatgctattcctaaaggttttatggatggtaaacaggcctgtgaacgaatgatccgggctttagaattggacccaaacttgtacagaattggacagagcaagatatttttcagagctggagttctggcacacttagaggaagaaagagatttaaaaatcaccgatatcattatcttcttccaggccgtttgcagaggttgcctggccagaaaggcctttgccaagaagcagcagcaactaagtgccttaaaggtcttgcagcggaactgtgccgcgtacctgaaattacggcactggcagtggtggcgagtcttcacaaaggtgaagccgcttctacaagtgactcgccaggaggaagaacttcaggccaaagatgaagagctgttgaaggtgaaggagaagcagacaaaggtggaaggagagctggaggagatggagcggaagcaccagcagcttttagaagagaagaatatccttgcagaacaactacaagcagagactgagctctttgctgaagcagaagagatgagggcaagacttgctgctaaaaagcaggaattagaagagattctacatgacttggagtctagggttgaagaagaagaagaaagaaaccaaatcctccaaaatgaaaagaaaaaaatgcaagcacatattcaggacctggaagaacagctagacgaggaggaaggggctcggcaaaagctgcagctggaaaaggtgacagcagaggccaagatcaagaagatggaagaggagattctgcttctcgaggaccaaaattccaagttcatcaaagaaaagaaactcatggaagatcgcattgctgagtgttcctctcagctggctgaagaggaagaaaaggcgaaaaacttggccaaaatcaggaataagcaagaagtgatgatctcagatttagaagaacgcttaaagaaggaagaaaagactcgtcaggaactggaaaaggccaaaagaaaactcgacggggagacgaccgacctgcaggaccagatcgcagagctgcaggcgcagattgatgagctcaagctgcagctggccaagaaggaggaggagctgcagggcgcactggccagaggtgatgatgaaacactccataagaacaatgcccttaaagttgtgcgagagctacaagcccaaattgctgaacttcaggaagactttgaatccgagaaggcttcacggaacaaggccgaaaagcagaaaagggacttgagtgaggaactggaagctctgaaaacagagctggaggacacgctggacaccacggcagcccagcaggaactacgtacaaaacgtgaacaagaagtggcagagctgaagaaagctcttgaggaggaaactaagaaccatgaagctcaaatccaggacatgagacaaagacacgcaacagccctggaggagctctcagagcagctggaacaggccaagcggttcaaagcaaatctagagaagaacaagcagggcctggagacagataacaaggagctggcgtgtgaggtgaaggtcctgcagcaggtcaaggctgagtctgagcacaagaggaagaagctcgacgcgcaggtccaggagctccatgccaaggtctctgaaggcgacaggctcagggtggagctggcggagaaagcaagtaagctgcagaatgagctagataatgtctccacccttctggaagaagcagagaagaagggtattaaatttgctaaggatgcagctagtcttgagtctcaactacaggatacacaggagcttcttcaggaggagacacgccagaaactaaacctgagcagtcggatccggcagctggaagaggagaagaacagtcttcaggagcagcaggaggaggaggaggaggccaggaagaacctggagaagcaagtgctggccctgcagtcccagttggctgataccaagaagaaagtagatgacgacctgggaacaattgaaagtctggaagaagccaagaagaagcttctgaaggacgcggaggccctgagccagcgcctggaggagaaggcactggcgtatgacaaactggagaagaccaagaaccgcctgcagcaggagctggacgacctcacggtggacctggaccaccagcgccaggtcgcctccaacttggagaagaagcagaagaagtttgaccagctgttagcagaagagaagagcatctctgctcgctatgccgaagagcgggaccgggccgaagccgaggccagagagaaagaaaccaaagccctgtcactggcccgggccctcgaggaagccctggaggccaaggaggagtttgagaggcagaacaagcagctccgagcagacatggaagacctcatgagctccaaagatgatgtgggaaaaaacgttcacgaacttgaaaaatccaaacgggccctagagcagcaggtggaggaaatgaggacccagctggaggagctggaagacgaactccaggccacggaagatgccaagcttcgtctggaggtcaacatgcaggccatgaaggcgcagttcgagagagacctgcaaaccagggatgagcagaatgaagagaagaagcggctgctgatcaaacaggtgcgggagctcgaggcggagctggaggatgagaggaaacagcgggcgcttgctgtagcttcgaagaaaaagatggagatagacctgaaggacctcgaagcccaaatcgaggctgcgaacaaagctcgggatgaggtgattaagcagctccgcaagctccaggctcagatgaaggattaccaacgtgaattagaagaagctcgtgcatccagagatgagatttttgctcaatccaaagagagtgaaaagaaattgaagagtctggaagcagaaatccttcaattgcaggaggaacttgcctcatctgagcgagcccgccgacacgccgagcaggagagagatgagctggcggacgagatcaccaacagcgcctctggcaagtccgcgctgctggatgagaagcggcgtctggaagctcggatcgcacagctggaggaggagctggaagaggagcagagcaacatggagctgctcaacgaccgcttccgcaagaccactctacaggtggacacactgaacgccgagctagcagccgagcgcagcgccgcccagaagagtgacaatgcacgccagcaactggagcggcagaacaaggagctgaaggccaagctgcaggaactcgagggtgctgtcaagtctaagttcaaggccaccatctcagccctggaggccaagattgggcagctggaggagcagcttgagcaggaagccaaggaacgagcagccgccaacaaattagtccgtcgcactgagaagaagctgaaagaaatcttcatgcaggttgaggatgagcgtcgacacgcggaccagtataaagagcagatggagaaggccaacgctcggatgaagcagcttaaacgccagctggaggaagcagaagaagaagcgacgcgtgccaacgcatctcggcgtaaactccagcgggaactggatgatgccaccgaggccaacgagggcctgagccgcgaggtcagcaccctgaagaaccggctgaggcggggtggccccatcagcttctcttccagccgatctggccggcgccagctgcaccttgaaggagcttccctggagctctccgacgatgacacagaaagtaagaccagtgatgtcaacgagacgcagccaccccagtcagagtaaagttgcaggaagccagaggaggcaatacagtgggacagttaggaatgcacccggggcctcctgcagatttcggaaattggcaagctacgggattccttcctgaaagatcaactgtgtcttaaggctctccagcctatgcatactgtatcctgcttcagacttaggtacaattgctcccctttttatatacagacacacacaggacacatatattaaacagattgtttcatcattgcatctattttccatatagtcatcaagagaccattttataaaacatggtaagaccctttttaaaacaaactccaggcccttggttgcgggtcgctgggttattggggcagcgccgtggtcgtcactcagtcgctctgcatgctctctgtcatacagacaggtaacctagttctgtgttcacgtggcccccgactcctcagccacatcaagtctcctagaccactgtggactctaaactgcacttgtctctctcatttccttcaaataatgatcaatgctatttcagtgagcaaactgtgaaaggggctttggaaagagtaggaggggtgggctggatcggaagcaacacccatttggggttaccatgtccatcccccaaggggggccctccccctcgagtcgatggtgtcccgcatctactcatgtgaactggccttggcgagggctggtctgtgcatagaagggatagtggccacactgcagctgaggccccaggtggcagccatggatcatgtagacttccagatggtctcccgaaccgcctggctctgccggcgccctcctcacgtcaggagcaagcagccgtggacccctaagccgagctggtggaaggcccctccccgtcgccagccgggccctcatgctgaccttgcaaattcagccgctgctttgagcccaaaatgggaatattggttttgtgtccgaggcttgttccaagtttgtcaatgaggtttatggagcctccagaacagatgccatcttcctgaatgttgacatgccagtgggtgtgactccttcatttttccttctcccttccctttggacagtgttacagtgaacacttagcatcctgtttttggttggtagttaagcaaactgacattacggaaagtgccttagacactacagtactaagacaatgttgaatatatcattcgcctctataacaatttaatgtattcagttttgactgtgcttcatatcatgtacctctctagtcaaagtggtattacagacattcagtgacaatgaatcagtgttaattctaaatccttgatcctctgcaatgtgcttgaaaacacaaaccttttgggttaaaagctttaacatctattaggaagaatttgtcctgtgggtttggaatcttggattttccccctttatgaactgtactggctgttgaccaccagacacctgaccgcaaatatcttttcttgtattcccatatttctagacaatgatttttgtaagacaataaatttattcattatagatatttgcgcctgctctgtttacttgaagaaaaaagcacccgtggagaataaagagacctcaataaacaaaaaaaaaaa

SEQ ID NO: 5243 - DNA, 455 bp, Homo sapiens; identical to SEQ ID NO: 940

SEQ ID NO: 5244 - DNA, 3549 bp, Homo sapiens
cccctcttcctcctcctcaagggaaagctgcccacttctagctgccctgccatcccctttaaagggcgacttgctcagcgccaaaccgcggctccagccctctccagcctccggctcagccggctcatcagtcggtccgcgccttgcagctcctccagagggacgcgccccgagatggagagcaaagccctgctcgtgctgactctggccgtgtggctccagagtctgaccgcctcccgcggaggggtggccgccgccgaccaaagaagagattttatcgacatcgaaagtaaatttgccctaaggacccctgaagacacagctgaggacacttgccacctcattcccggagtagcagagtccgtggctacctgtcatttcaatcacagcagcaaaaccttcatggtgatccatggctggacggtaacaggaatgtatgagagttgggtgccaaaacttgtggccgccctgtacaagagagaaccagactccaatgtcattgtggtggactggctgtcacgggctcaggagcattacccagtgtccgcgggctacaccaaactggtgggacaggatgtggcccggtttatcaactggatggaggaggagtttaactaccctctggacaatgtccatctcttgggatacagccttggagcccatgctgctggcattgcaggaagtctgaccaataagaaagtcaacagaattactggcctcgatccagctggacctaactttgagtatgcagaagccccgagtcgtctttctcctgatgatgcagattttgtagacgtcttacacacattcaccagagggtcccctggtcgaagcattggaatccagaaaccagttgggcatgttgacatttacccgaatggaggtacttttcagccaggatgtaacattggagaagctatccgcgtgattgcagagagaggacttggagatgtggaccagctagtgaagtgctcccacgagcgctccattcatctcttcatcgactctctgttgaatgaagaaaatccaagtaaggcctacaggtgcagttccaaggaagcctttgagaaagggctctgcttgagttgtagaaagaaccgctgcaacaatctgggctatgagatcaataaagtcagagccaaaagaagcagcaaaatgtacctgaagactcgttctcagatgccctacaaagtcttccattaccaagtaaagattcatttttctgggactgagagtgaaacccataccaatcaggcctttgagatttctctgtatggcaccgtggccgagagtgagaacatcccattcactctgcctgaagtttccacaaataagacctactccttcctaatttacacagaggtagatattggagaactactcatgttgaagctcaaatggaagagtgattcatactttagctggtcagactggtggagcagtcccggcttcgccattcagaagatcagagtaaaagcaggagagactcagaaaaaggtgatcttctgttctagggagaaagtgtctcatttgcagaaaggaaaggcacctgcggtatttgtgaaatgccatgacaagtctctgaataagaagtcaggctgaaactgggcgaatctacagaacaaagaacggcatgtgaattctgtgaagaatgaagtggaggaagtaacttttacaaaacatacccagtgtttggggtgtttcaaaagtggattttcctgaatattaatcccagccctacccttgttagttattttaggagacagtctcaagcactaaaaagtggctaattcaatttatggggtatagtggccaaatagcacatcctccaacgttaaaagacagtggatcatgaaaagtgctgttttgtcctttgagaaagaaataattgtttgagcgcagagtaaaataaggctccttcatgtggcgtattgggccatagcctataattggttagaacctcctattttaattggaattctggatctttcggactgaggccttctcaaactttactctaagtctccaagaatacagaaaatgcttttccgcggcacgaatcagactcatctacacagcagtatgaatgatgttttagaatgattccctcttgctattggaatgtggtccagacgtcaaccaggaacatgtaacttggagagggacgaagaaagggtctgataaacacagaggttttaaacagtccctaccattggcctgcatcatgacaaagttacaaattcaaggagatataaaatctagatcaattaattcttaataggctttatcgtttattgcttaatccctctctcccccttcttttttgtctcaagattatattataataatgttctctgggtaggtgttgaaaatgagcctgtaatcctcagctgacacataatttgaatggtgcagaaaaaaaaaagataccgtaattttattattagattctccaaatgattttcatcaatttaaaatcattcaatatctgacagttactcttcagttttaggcttaccttggtcatgcttcagttgtacttccagtgcgtctcttttgttcctggctttgacatgaaaagataggtttgagttcaaattttgcattgtgtgagcttctacagattttagacaaggaccgtttttactaagtaaaagggtggagaggttcctggggtggattcctaagcagtgcttgtaaaccatcgcgtgcaatgagccagatggagtaccatgagggttgttatttgttgtttttaacaactaatcaagagtgagtgaacaactatttataaactagatctcctatttttcagaatgctcttctacgtataaatatgaaatgataaagatgtcaaatatctcagaggctatagctgggaacccgactgtgaaagtatgtgatatctgaacacatactagaaagctctgcatgtgtgttgtccttcagcataattcggaagggaaaacagtcgatcaagggatgtattggaacatgtcggagtagaaattgttcctgatgtgccagaacttcgaccctttctctgagagagatgatcgtgcctataaatagtaggaccaatgttgtgattaacatcatcaggcttggaatgaattctctctaaaaataaaatgatgtatgatttgttgttggcatcccctttattaattcattaaatttctggatttgggttgtgacccagggtgcattaacttaaaagattcactaaagcagcacatagcactgggaactctggctccgaaaaactttgttatatatatcaaggatgttctggctttacattttatttattagctgtaaatacatgtgtggatgtgtaaatggagcttgtacatattggaaaggtcattgtggctatctgcatttataaatgtgtggtgctaactgtatgtgtctttatcagtgatggtctcacagagccaactcactcttatgaaatgggctttaacaaaacaagaaagaaacgtacttaactgtgtgaagaaatggaatcagcttttaataaaattgacaacattttattaccac

SEQ ID NO: 5245 - DNA, 167 bp, Homo sapiens
tttatcatcgaaataatttatttaccactagagcaccacaaaaacagacatacatcgtgttaaaatacagcgtaattggtcatcaaaatacaaaacagctaatcttatattccattttttaaccatgccaacgatcaaattgtactgctgattaacacaaaaataat

SEQ ID NO: 5246 - DNA, 287 bp, Homo sapiens; identical to SEQ ID NO: 3417

SEQ ID NO: 5247 - DNA, 432 bp, Homo sapiens
ttttttgatttgagtattttatttataaatgtacatttactataaaagctgttgcattttagacaacttgttgtttttattttttactgtttctcagaggcattttagaataaatactttaaatgaaagttagtataaccgatatagaacactggcccacccagagcagtaacatcttttggacggactcacatatgaggtggatcatttcagtttgttaaatcttacactgtgtatagataactataatatgtattgcattaatcacactacatagaaaggaaatgtcatggaagttcgctagtgaaaaacaaaaagttacccattatttttattaaagagtagggactagcttttggagtatgagaaaaaaaaatcagatatacttcctcaggaacaataaatcactcacttgcctcacctgttttttaa

SEQ ID NO: 5248 - DNA, 355 bp, Homo sapiens
ccagaagtaaggtaactttactcagataaaacacagatggtagcagatagaggccacaagctcatgggatgccattccagagggcccctcacccacagaggagcccctgtaggaaggaggcccaggccccatccgcacagcaagtcccggtgaggggctctaacacacccccactccagcctctggtcatggacacagcccatagcgggcacagcatcatgatggaatggactctgcaggccacgcatggctcctgggaacccccagcccctcccttctcctcccagcctttccagctgtcttcccaccaggagggctcggaggtcacagcacggaacgtcttccaagagcccct

SEQ ID NO: 5249 - DNA, 5316 bp, Homo sapiens
cggacgcgtgggaacgaagccacccattacggtatgatgatgtcaaacgtgatgctgatgctacagttacagcccctgctggcgcagcctctctgattctctctccctctccgcgtccagtgctgggctttttcagacaagtgcatctcctaaccaggtcacatttcagccgcgacccactctccgccagtcaccggaggcagaccgcgggaggagagctgaggacagccgcgtgcgcttcgccagcagcggggtgggaggaaggacattaaaatactgcagaagtcaagaccccccaggtcgaacccagaccacgatgcgcgccccgggctgcgggcggctggtgctgccgctgctgctcctggccgcggcagccctggccgaaggcgacgccaaggggctcaaggagggcgagacccccggcaatttcatggaggacgagcaatggctgtcgtccatctcgcagtacagcggcaagatcaagcactggaaccgcttccgagacgaagtggaggatgactatatcaagagctgggaggacaatcagcaaggagatgaagccctggataccaccaaggacccctgccagaaggtgaagtgcagccgccacaaggtgtgcattgcccagggctaccagcgggccatgtgcatcagtcgcaagaagctggagcacaggatcaagcagccgaccgtgaaactccatggaaacaaagactccatctgcaagccctgccacatggcccagcttgcctctgtctgcggctcagatggccacacttacagctctgtgtgtaagctggagcaacaggcgtgcctgagcagcaagcagctggcggtgcgatgcgagggcccctgcccctgccccacggagcaggctgccacctccaccgccgatggcaaaccagagacttgcaccggtcaggacctggctgacctgggagatcggctgcgggactggttccagctccttcatgagaactccaagcagaatggctcagccagcagtgtagccggcccggccagcgggctggacaagagcctgggggccagctgcaaggactccattggctggatgttctccaagctggacaccagtgctgacctcttcctggaccagacggagctggccgccatcaacctggacaagtacgaggtctgcatccgtcccttcttcaactcctgtgacacctacaaggatggccgggtctctactgctgagtggtgcttctgcttctggagggagaagcccccctgcctggcagagctggagcgcatccagatccaggaggccgccaagaagaagccaggcatcttcatcccgagctgcgacgaggatggctactaccggaagatgcagtgtgaccagagcagcggtgactgctggtgtgtggaccagctgggcctggagctgactggcacgcgcacgcatgggagccccgactgcgatgacatcgtgggcttctcgggggactttggaagcggtgtcggctgggaggatgaggaggagaaggagacggaggaagcaggcgaggaggccgaggaggaggagggcgaggcaggcgaggctgacgacgggggctacatctggtagacgccctcagaagccggctgccgggggggactcaacagcagagctctgagcagcagcaggcaacttcgagaacggatccagaaatgcagtcagaaggaccctgctccacctggggggactgggagtgtgagtgtgcatggcatgtgtgtggcacagatggctgggacgggtgacagtgtgagtgcatgtgtgcatgcatgtgtgtatgtgtgtgtgtgtgtggcatgcgctgacaaatgtgtccttgatccacactgctcctggcagagtgagtaacccaaaggccccttcggcctccttgtagctgttttctttccttttgttgttggttttaaaatacattcacacacaaatacaaattgacaggtcaaaatccatgaaatgagatcccccagccgtgtcctccagcccagccctgaccccttggtttctaccctggctccccttggtttctaccctggctcaaccgacccctgtctgcccttctccctcctgcttctgaggtcaagctctggcctgcgagcctgtccccattgcaaaggggagggaggggcagggagctgtctaccagctgaggtcctcccaaaactgggccgatgtggtgtgacatccccaccagcctcagatgagacgggccaggacgcccagccacagcaagccctgtccctttgccggatccccaaacactagagaagctctcctaacccaaggcggagaatgaaggtggtggcggcagaggaggagggcagcagctgagaggccagggacagggtgcctcgccaagctgtctgaggtctgtcccaggtggcccaggtggtgcaggtagaacagggtgaggagagggggtcggctcaacaggaggaggctgtggctgcagagcctggaggagcttttaggtgttgagatggggcagctctgaatcctagaccctggaatagcctgtcccttttctctgggtctcgtggtggagccatgatctgggctgctctcttggggacactgggtggtggttacacagttgacctctgcctggctcccccttggtgcaactcctgcctccatcccccttgctggggtcccctcatccacttgagggcgcctgagggccaggagcagcaggcaaggagcctgggtctaggctaagggggtgtgtgcccacctcctccctgacccttaacactcctgtcctgcccagaccaacagagagagctgtccctgagaccccggagagaagcagctgccgaaagctgcagcctttccgcactctgagaccatgatcttcctcctgccaggggagagccacccacaggccatgtccagccccacttccctcagcccccagggcttccttctggcccctctgaggattccctagggctgccccgcagaggggcttccccaagctctgttttgaagcctgcaatgtggaaaagtgagaagtcagagggaacaggacaggtgcagccgggctctgaggccacacctcacacctcgctgttccccaacatcccctgagcagtgtgagctcatctcaccagatgagaagaggccctgtgcatttcttttgtttgtttgttgctgttttcccccacccatccagttctcctcagcaaagcaaattccttaacacctttggtggagaatttcttacccagacttggggctgtgatgcccttcagtgcgtggtgagtgcagcgtgtgtgcgtgtgcctgtgtgtgaacctgggggccatcctggtggcctgggagcgtgaggagaggccccctgtgtgctgggtgagtggtgggtgtggggtcaatgcagtgaggctctctgggtgaggctcccaacctggcagtccccagcctcccagcatctgtgagcgtctgttggactttacagaagagcctcatcccgtctgcccctcactctgccctggaatcaacatcttccgagtccttcttgggggaaatagcagagccccacttaactccataaactgcttcccattccgcagcccagttctgattgttgaggtgtcgcgtcgttccaggtcccccagtcccctctttctcctgtcctctctctgtccttcacctccccactccagccccggctcagttcagggaaatgctgttccatatcagccctctgctctctgaggcagccgcgcctctgactcggagctacttgaaacttctgctcttgctaggattggagtctacctatctcttccatttgtcccagctggagttctggaactttcctcctcggggtgggggtgggggttgttaaggatgctggggggcctggggaaggaaggagttcagaggaagggtgtcccctgtcctcttgatgtcaccctccgctcctgggacacgtgctctctctgtctctgggtcttctggctgtgcacgtttgtgtgtccttgtaaatatgttttaggaagaaagcaaaagggactgaactagcctctggtaggattgcaggggtccagccttgcctgtttccgaagcccccacactgcctttcgccccactgagactggtcccctcaaaaggtagacaaaacagcagctccctgtggagctgaagggcggcctcaaagtggctttttgttagacaaggttaaggtttcctcatgagcaaggttgcagatcggtccttcctcagctccttgatttgtgaccttgaccaaggggcctgccacccagcccctccagtgccctctcctcgatgcctcgctccttcctgcccccactcccctggcttaggcaggtaggggaattagggccatgctggaagaagcttaaccatgtgttcaaagaacggtttcttgcttgcttggtcctggaactccccttggctgccccaggcctccttggcccatgggtgctgggggaggtggatgtcagatctggtaggttgcagcagagaaaataaatgtgccttgagagaccactcagagagggtccaagggtgatggagaaggaagcatggcctgggagcttggaagggaggggtggtgggtggcggcatcttgactgccccctgttgtcccacacgtggggggtggtcaccccccttcactccagcccgcctgccttcagccttccatgagcttcacctgcttccaacttcactttggagggggtggggtccgttggcatcaacacggggaccctctgcttcaccaaagcccgagccctcagcccctggggagaacaaatggctgagctttgatacctggggtcgtcgagaggctgcgggctggcggcagtcccaggggagagacaccacagaaggagacccagacatcccgaggaagttcccagcagagcaaactgctttccagcctgaagcctgcttaaactgtgtgatgtgcaataactgagcttagagttaggaattgtgttcaagtgcttggatttccgtctgtagatttaactgctgaaattgtatctctcagtaattttagatgtcttttaaaaaattgaaaaacaaagtgttagactgtgtgcgtgtgcgttgatgggcactcaagagtcccgtgagtcatccagccctgcctttcccctgcgcccccatcctctcacgtcccgccctgcctccacttggggaccctgcctcgtgtcgtctttatctgcctattactcagcctaaggaaacaagtacactccacacatgcataaaggaaatcaaatgttatttttaagaaaatggaaaataaaaactttataaacacc

SEQ ID NO: 5250 - DNA, 3073 bp, Homo sapiens
cctggggccaggactgctgctgtcactgccatccattggagcccagcaccccctccccgcccatccttcggacagcaactccagcccagccccgcgtccctgtgtccacttctcctgacccctcggccgccaccccagaaggctggagcagggacgccgtcgctccggccgcctgctcccctcgggtccccgtgcgagcccacgccggccccggtgcccgcccgcagccctgccactggacacaggataaggcccagcgcacaggcccccacgtggacagcatggaccgcggcacgctccctctggctgttgccctgctgctggccagctgcagcctcagccccacaagtcttgcagaaacagtccattgtgaccttcagcctgtgggccccgagaggggcgaggtgacatataccactagccaggtctcgaagggctgcgtggctcaggcccccaatgccatccttgaagtccatgtcctcttcctggagttcccaacgggcccgtcacagctggagctgactctccaggcatccaagcaaaatggcacctggccccgagaggtgcttctggtcctcagtgtaaacagcagtgtcttcctgcatctccaggccctgggaatcccactgcacttggcctacaattccagcctggtcaccttccaagagcccccgggggtcaacaccacagagctgccatccttccccaagacccagatccttgagtgggcagctgagaggggccccatcacctctgctgctgagctgaatgacccccagagcatcctcctccgactgggccaagcccaggggtcactgtccttctgcatgctggaagccagccaggacatgggccgcacgctcgagtggcggccgcgtactccagccttggtccggggctgccacttggaaggcgtggccggccacaaggaggcgcacatcctgagggtcctgccgggccactcggccgggccccggacggtgacggtgaaggtggaactgagctgcgcacccggggatctcgatgccgtcctcatcctgcagggtcccccctacgtgtcctggctcatcgacgccaaccacaacatgcagatctggaccactggagaatactccttcaagatctttccagagaaaaacattcgtggcttcaagctcccagacacacctcaaggcctcctgggggaggcccggatgctcaatgccagcattgtggcatccttcgtggagctaccgctggccagcattgtctcacttcatgcctccagctgcggtggtaggctgcagacctcacccgcaccgatccagaccactcctcccaaggacacttgtagcccggagctgctcatgtccttgatccagacaaagtgtgccgacgacgccatgaccctggtactaaagaaagagcttgttgcgcatttgaagtgcaccatcacgggcctgaccttctgggaccccagctgtgaggcagaggacaggggtgacaagtttgtcttgcgcagtgcttactccagctgtggcatgcaggtgtcagcaagtatgatcagcaatgaggcggtggtcaatatcctgtcgagctcatcaccacagcggaaaaaggtgcactgcctcaacatggacagcctctctttccagctgggcctctacctcagcccacacttcctccaggcctccaacaccatcgagccggggcagcagagctttgtgcaggtcagagtgtccccatccgtctccgagttcctgctccagttagacagctgccacctggacttggggcctgagggaggcaccgtggaactcatccagggccgggcggccaagggcaactgtgtgagcctgctgtccccaagccccgagggtgacccgcgcttcagcttcctcctccacttctacacagtacccatacccaaaaccggcaccctcagctgcacggtagccctgcgtcccaagaccgggtctcaagaccaggaagtccataggactgtcttcatgcgcttgaacatcatcagccctgacctgtctggttgcacaagcaaaggcctcgtcctgcccgccgtgctgggcatcacctttggtgccttcctcatcggggccctgctcactgctgcactctggtacatctactcgcacacgcgtgagtaccccaggcccccacagtgagcatgccgggcccctccatccacccgggggagcccagtgaagcctctgagggattgaggggccctggcaggaccctgacctccgcccctgcccccgctcccgctcccaggttcccccagcaagcgggagcccgtggtggcggtggctgccccggcctcctcggagagcagcagcaccaaccacagcatcgggagcacccagagcaccccctgctccaccagcagcatggcatagccccggccccccgcgctcgcccagcaggagagactgagcagccgccagctgggagcactggtgtgaactcaccctgggagccagtcctccactcgacccagaatggagcctgctctccgcgcctacccttcccgcctccctctcagaggcctgctgccagtgcagccactggcttggaacaccttggggtccctccaccccacagaaccttcaacccagtgggtctgggatatggctgcccaggagacagaccacttgccacgctgttgtaaaaacccaagtccctgtcatttgaacctggatccagcactggtgaactgagctgggcaggaagggagaacttgaaacagattcaggccagcccagccaggccaacagcacctccccgctgggaagagaagagggcccagcccagagccacctggatctatccctgcggcctccacacctgaacttgcctaactaactggcaggggagacaggagcctagcggagcccagcctgggagcccagagggtggcaagaacagtgggcgttgggagcctagctcctgccacatggagccccctctgccggtcgggcagccagcagagggggagtagccaagctgcttgtcctgggcctgcccctgtgtattcaccaccaataaatcagaccatgaaacctgaaaaaaaaaaaaa

SEQ ID NO: 5251 - DNA, 376 bp, Homo sapiens
  misc_feature (1)..(376): n=a,t,g or c
tttagagcaggagtgagagtttattaaaaagttttagagcaggaacaaaaggaagtacactacacttggatcaggcaggcaacttgagagatctaagtgccctgcctgacccttaacttggggttttatgtatttggcatagttctgggatttacgtctcanctcccctgattcttcccttccgcgtatgtggtgacctgccagcacttggaaggggtcgcatgcacagtgtgattactgaagttgcgcgcatgtcacttgaggcatttttccccttaccagtcgtgcgttcccagaggaaggtaggtcatatactggttaaatncgccattttgcctcttggtgcgcatntccaggctgcttgccantcctgaga

SEQ ID NO: 5252 - DNA, 275 bp, Homo sapiens
  misc_feature (1)..(275): n=a,t,g or c
tataatagaaaaatattttatttgtattgttgtataaaatatttacaatcatatagaatatatagagttacattttaatagcaactgtgtacatgtcacgaaaccatttcccttatcaaagatgtaatttgtaaacctcaaatagttgtgtatctcgtcctgttagaagtagatgacttcaattaaacaaatttatgaatcagaataatgtccttcataaatttgtttaattgaagtcatctacttctaacagggccgnggcacccnccatnttt

SEQ ID NO: 5253 - DNA, 519 bp, Homo sapiens; identical to SEQ ID NO: 539
  misc_feature (1)..(519): n=a,t,g or c

SEQ ID NO: 5254 - DNA, 384 bp, Homo sapiens; identical to SEQ ID NO: 798

SEQ ID NO: 5255 - DNA, 292 bp, Homo sapiens; identical to SEQ ID NO: 3442
  misc_feature (1)..(292): n=a,t,g or c

SEQ ID NO: 5256 - DNA, 340 bp, Homo sapiens
  misc_feature (1)..(340): n=a,t,g or c
gtaggataacagtgttttnaatatttaagtaacaaaacattcaggttaatactcaatgcatatacaataagatagagcaacaacaacaaaattacaaagcacaatctaactatatggaggctttcaaacaattaaatagttggatagagaatgcgctaattaaaaacccagctgagccacaccgcactacctgagacctgaccagggactttctggtggtagaagggagagctcattgtgccctgtggccttcaactcaaatggatgctcttcaactcaaatccagagagcacttaacaaactccatgctctagattcgctcaaccctcctccttgcttt

SEQ ID NO: 5257 - DNA, 227 bp, Homo sapiens
tttagcattagcaattttttatttttccttttttgttgcataggaaatgcagtacttgcttccagtaattgtattgtaatgtgagaaggtggtagcactaatggttgaatacaagagttaaactaatccacaccagctcaaaaaacctgtggagatttagttgaataagaatggacgcccacagtgattctcaaccaattacaaattttcacagaacacagtaaaac

SEQ ID NO: 5258 - DNA, 255 bp, Homo sapiens; identical to SEQ ID NO: 667
  misc_feature (1)..(255): n=a,t,g or c

SEQ ID NO: 5259 - DNA, 261 bp, Homo sapiens; identical to SEQ ID NO: 763
  misc_feature (1)..(261): n=a,t,g or c

SEQ ID NO: 5260 - DNA, 439 bp, Homo sapiens; identical to SEQ ID NO: 128

SEQ ID NO: 5261 - DNA, 299 bp, Homo sapiens; identical to SEQ ID NO: 3508
  misc_feature (1)..(299): n=a,t,g or c

SEQ ID NO: 5262 - DNA, 491 bp, Homo sapiens; identical to SEQ ID NO: 3356
  misc_feature (1)..(491): n=a,t,g or c

SEQ ID NO: 5263 - DNA, 458 bp, Homo sapiens; identical to SEQ ID NO: 3341
  misc_feature (1)..(458): n=a,t,g or c

SEQ ID NO: 5264 - DNA, 401 bp, Homo sapiens
ttagaaatcaggtttttttttatttaatacattctaatcaaatagtaacagcagtaaataaacactttgaaaaacaggcaggtatccccctgtatctggaagaaaattaagtcaaagtattctacacagtagaagggagacaactgtttatgtccatggttagacaattcaaggacaacttggatatttctaaagccatttccaaaaaatcaatggcaacaggttgggacacagctatttcaaagggtagaatgcctatacctacattggtttttattaacggggattgagttgcacctgtatagcatgatattcttgtctttagctttaaaggaaaagagaaagtcttttccatttgcaccagtttgaaatatttctgaaataaggctcccatagaatgg

SEQ ID NO: 5265 - DNA, 275 bp, Homo sapiens; identical to SEQ ID NO: 3496

SEQ ID NO: 5266 - DNA, 236 bp, Homo sapiens
tttttttttttttttttttttttttttttttatttacaaataattgtttttattaggccatttggaaaaccactaacattttttattttagaaaacattaaataataaacaagatgttatacagtactttggataacttcttccatcagtttagtgcaatgtatcattggcatcgaaaagtaaaattttcatttattttcccctttcatcttcagctgtgcagttatatgaccata

SEQ ID NO: 5267 - DNA, 378 bp, Homo sapiens; identical to SEQ ID NO: 2880

SEQ ID NO: 5268 - DNA, 610 bp, Homo sapiens; identical to SEQ ID NO: 2174
  misc_feature (1)..(610): n=a,t,g or c

SEQ ID NO: 5269 - DNA, 616 bp, Homo sapiens; identical to SEQ ID NO: 545
  misc_feature (1)..(616): n=a,t,g or c

SEQ ID NO: 5270 - DNA, 281 bp, Homo sapiens; identical to SEQ ID NO: 774
  misc_feature (1)..(281): n=a,t,g or c

SEQ ID NO: 5271 - DNA, 2254 bp, Homo sapiens; identical to SEQ ID NO: 788

SEQ ID NO: 5272 - DNA, 424 bp, Homo sapiens
tttttattgttacagaaccattaaatacaacttatacacaagcaagctgggcggcgtccggggggcagggagagtgcaagagggtcaggggtgagcagtccgggcccggtcctggagggggctgaggctgccgtcgtgggaggggcttggctggcggaggcgggctgcctgtggaggccttgaagctttgccagcagctcctggatgaagtcctcgacaggtttcccacatgacttcaggagtccctggattttccggcttctctcctcttcactctctaactccaacaattcatcaatgttgatctcatcgggcatgtctgcctccatgccgcggtacagctcctccaggcgcccgtcgatccacttctccacgtccagccgccgctgcagctcccgccggtcatacttgacggtgacgcgcg

SEQ ID NO: 5273 - DNA, 379 bp, Homo sapiens
ttttttttttttcaactgaagaaatttatttacttttttctaggtacatagatgacataattatagacaagttttgatacataggaaaacccttccgtccacctctctttatgctaaatgaatcatcacaataatttttacaatttttaaaacaatacacagctttcttgggctgaagcaattgcaagaacatattggtactggtatattacagctacttacaatgtttttaagaacagcaatggagaaaaataagttatttaaatattgatttcatatacagaaagtgcaatgttgttagttgttatataacttgctcgacagtttcttttctctatcaattttaaatcaagataacttgggactcagactattatat

SEQ ID NO: 5274 - DNA, 2344 bp, Homo sapiens
cctccctgactgggaactcgcttggccgcaatgacctggctgatggtgtgaactcgggccagggcctgggcatcgagatcatcgggaccctccagctggtgctatgcgtgctggctactaccgaccggaggcgccgtgaccttggtggctcagccccccttgccatcggcctctctgtagcccttggacacctcctggctattgactacactggctgtgggattaaccctgctcggtcctttggctccgcggtgatcacacacaacttcagcaaccactggattttctgggtggggccattcatcgggggagccctggctgtactcatctacgacttcatcctggccccacgcagcagtgacctcacagaccgcgtgaaggtgtggaccagcggccaggtggaggagtatgacctggatgccgacgacatcaactccagggtggagatgaagcccaaatagaaggggtctggcccgggcatccacgtagggggcaggggcaggggcgggcggagggaggggaggggtgaaatccatactgtagacactctgacaagctggccaaagtcacttccccaagatctgccagacctgcatggtcaagcctcttatgggggtgtttctatctctttctttctctttctgtttcctggcctcagagcttcctggggaccaagatttaccaattcacccactcccttgaagttgtggaggaggtgaaagaaagggacccacctgctagtcgcccctcagagcatgatgggaggtgtgccagaaagtcccccctcgccccaaagttgctcaccgactcacctgcgcaagtgcctgggattctaccgtaattgctttgtgcctttgggcaggccctccttcttttcctaacatgcaccttgctcccaatggtgcttggagggggaagagatcccaggaggtgcagtggagggggcaagctttgctccttcagttctgcttgctcccaagcccctgacccgctcggacttcctgcctgaccttggaatcgtccctatatcagggcctgagtgacctccttctgcaaagtggcagggaccggcagagctctacaggcctgcagcccctaagtgcaaacacagcatgggtccagaagacgtggtctagaccagggctgctctttccacttgccctgtgttctttccccaggggcatgactgtcgccacacgcctctgtgtacatgtgtgcagagcagacaggctacaaagcagagatcgacagacagccaggtagttggaactttctgttccctctggagaggcttccctacacagggcctgctattgcagaatgaagccatttagagggtgaaggagaaatacccatgttacttctctgacttttagttggtctttccatctatcactgcattatcttgctcattcttcagttctctactccctcttgtcagtgtagacacaggtcaccattatgctggtgtatgtttatcaaagagcacttgagctgtctgaagcccaaagcctgaggacagaaagaccctgatgcaggtcagcccatggaggcagatgcccttcctgggcctgggggttttccaagccctcagctggtcctgaccaggatggagcaagctcttcccttgctcatgagctcctgatcagaggcatttgagcagctgataacctgcacaggcttgctgtatgacccctggccacagccttccctctgcattgacctggaggggagaggtcagccttgacctaatgaggtagctatagttgcagcccaaggacagttcagagatcaggatcagctttgaaggctggattctatctacataagtcctttcaattccaccagggccagagcagctccaccactgtgcacttagccatgatggcaacagaaaccaagagacacaattacgcaggtatttagaaggagagggcaaccagaaggcccttaactatcaccagtgcatcacatctgcagcactctcttctctattccctagcaggaacttctagctcatttaacagataaagaaactgaggcccacggtttcagctagacaatgatttgccaggcctagtaaccaaggccctgtctctggctactccctggaccacgaggctgattcctctcatttccagcttctcagtttctgcctgggcaatgccaggggccaggagtggggagagttgtgatggaggggagaggggtcacacccaccccctgcctggttctaggctgctgcacaccaaggccctgcatctgtctgctctgcatatatgtctctttggagttggaatttcattatatgttaagaaaataaaggaaaatgacttgtaaggtc

SEQ ID NO: 5275 - DNA, 332 bp, Homo sapiens
  misc_feature (1)..(332): n=a,t,g or c
aatgattttatttttaaatgtggacaggcaagcagaggtggttggcaaaggcaaggtggctgacgatccggaagctgtacaggagagataagggcactggctgccagagtgccctatcgaagcatcatccgaaccctgcggtaggggtggcccacaccacggcctgaggccagttcaatgccatatttgtgggcggcactcaggacactgcatagcgaccattgagatttgatcggtaacaggatgcataccaccaggcaccgtggacaatcactgcanagttgctgttgcttgaatcgtggtcagcgtcataggtgggtaaagggcctccc

SEQ ID NO: 5276 - DNA, 437 bp, Homo sapiens
  misc_feature (1)..(437): n=a,t,g or c
ttttgcaaaaaaccatccatttatacagtttgtggttcagaagcaacaatatgcacaacggtggaacagtctgtgctgtccccaccccacctgaactcgccagttcctgtctcccaaggggcacagaacacaggccccctgcctggcagacccgacttagttacaggcccctgggaggnggnaacttagcgggtcgaggccaggagggaggaggaccagcacctgatgcccctggggccncgctgggtcatggaactgtgtgtgtggangggtggggggtcagcccaccacgggccatttctccccaaggctaagggcgggggaacaagtaaagctgaggagagggcttcatgggacagggttcccatcccctgctggganggtgttcctggataccccacaaggcacttacagatgcaaactttangcgagtnccc

SEQ ID NO: 5277 - DNA, 514 bp, Homo sapiens
  misc_feature (1)..(514): n=a,t,g or c
gatcgccagagcccaggagtttgaggctgcagtgagctatgagggtgcctctttgctccatcctaggcaacagagtgagacgctgtttaaaaaggaaaaaatccttccntagagctagtatcctaaagctgcagagctagcccatgacctcattggtttcnttgtccttggggtgcttttcctgaatctttgggggtgaagggagtnttgctcccagtccagaggcctgattcttttcggactgggttctcaagacacgaccaggttctcaagacacgagtccccttnttcctncccattaaagggggtttntnagaagcaagancagcccctttccccaagtcacagcctgaagggaggccccngagangcttccctcctttccccncaccctgnttccttaaccttnttttgnccctgntttttttaggaanctggnagtttcaattngtttttaangggggattgggggggaagggaagncttngggggacaaaaaanntttttnttncaa

SEQ ID NO: 5278 - DNA, 538 bp, Homo sapiens
tttttttttttttttttttttttctccaaagtaagtttttattacaaaaacctttactacaattcaatgttttattaagactaaagtcaggaccttgccaacttactgagtcataaggaaacacatgaggaaagtcaacatggtctctaggctgacttgaattattccttgactaagaattctagggttatgtggacttttctgttaacatcctgacttagttcctttctttagcagcaaaaaaaacagcagaaataaaattcttggcaggctgctctacagaataaagtgaacaataggaaatatggatatgaagtgcagaagcagcaagttaccacaagatggggctatacactcaagaaagaacagttggttagcgaagtttctctattatcaaaaaaatttaaaaatactttgagtttatttgatgccttcatctttacagcccagctaagcaatcccataaaaatgaggcactgactaatgttttacaagcccctcagtctcctccagagagtggaggattattaggataggc

SEQ ID NO: 5279 - DNA, 372 bp, Homo sapiens; identical to SEQ ID NO: 3419
  misc_feature (1)..(372): n=a,t,g or c

SEQ ID NO: 5280 - DNA, 363 bp, Homo sapiens; identical to SEQ ID NO: 68

SEQ ID NO: 5281 - DNA, 233 bp, Homo sapiens
  misc_feature (1)..(233): n=a,t,g or c
natgaacagtatataatctaatctctttaattttatgtacatgaatataatgtatgtcaactttgtacatgagatacatatagtatttaaacattttactcaacaaacaagaatttacaatagcaatataactgactagagggctatcaacttaataatacttagattagatctgtactttaataggaaaagaatttaatagtttacaatcatagaaacactgacatttaaaa

SEQ ID NO: 5282 - DNA, 286 bp, Homo sapiens
  misc_feature (1)..(286): n=a,t,g or c
ctaaaaaggactattatcagtttccaaatacaatacttctctcttctggtttttcctgaatgagcctgattttgttgctggttttcatcatctatgagggtaaaacgagtacccttaaaatccctgtggccagtttgaacacccctgttgtattcttttctctgttcagtgtgtcagctattttgtgaagatgcttagatgtatagttttnataaccacagttttaaatctttaatctgtgcataataaaaagatatatatcagttaaaaaaaaaaaaaaaaaaaa

SEQ ID NO: 5283 - DNA, 6360 bp, Homo sapiens
ctgggccacgtgccccggaagcttgctgcctgacgctgtcctcagcagtcccctgtctcatcgcagcaaaaggagcctatcctgtcggccccacatggtcaagctggtgtgtcccgctgacaacctgcgggctgaagggctcgagtgtgccaaaacgtgccagaactatgacctggagtgcatgagcatgggctctgtctctggctgcctctgccccccgggcatggtccggcatgagaacagatgtgtggccctggaaaggtgtccctgcttccatcagggcaaggagtatgcccctggagaaacagtgaagattggctgcaacacttgtgtctgtcgggaccggaagtggaactgcacagaccatgtgtgtgatgccacgtgctccacgatcggcatggcccactacctcaccttcgacgggctcaaatacctgttccccggggagtgccagtacgttctggtgcaggattactgcggcagtaaccctgggacctttcggatcctagtggggaataagggatgcagccacccctcagtgaaatgcaagaaacgggtcaccatcctggtggagggaggagagattgagctgtttgacggggaggtgaatgtgaagaggcccatgaaggatgagactcactttgaggtggtggagtctggccggtacatcattctgctgctgggcaaagccctctccgtggtctgggaccgccacctgagcatctccgtggtcctgaagcagacataccaggagaaagtgtgtggcctgtgtgggaattttgatggcatccagaacaatgacctcaccagcagcaacctccaagtggaggaagaccctgtggactttgggaactcctggaaagtgagctcgcagtgtgctgacaccagaaaagtgcctctggactcatcccctgccacctgccataacaacatcatgaagcagacgatggtggattcctcctgtagaatccttaccagtgacgtcttccaggactgcaacaagctggtggaccccgagccatatctggatgtctgcatttacgacacctgctcctgtgagtccattggggactgcgcctgcttctgcgacaccattgctgcctatgcccacgtgtgtgcccagcatggcaaggtggtgacctggaggacggccacattgtgcccccagagctgcgaggagaggaatctccgggagaacgggtatgagtgtgagtggcgctataatagctgtgcacctgcctgtcaagtcacgtgtcagcaccctgagccactggcctgccctgtgcagtgtgtggagggctgccatgcccactgccctccagggaaaatcctggatgagcttttgcagacctgcgttgaccctgaagactgtccagtgtgtgaggtggctggccggcgttttgcctcaggaaagaaagtcaccttgaatcccagtgaccctgagcactgccagatttgccactgtgatgttgtcaacctcacctgtgaagcctgccaggagccgggaggcctggtggtgcctcccacagatgccccggtgagccccaccactctgtatgtggaggacatctcggaaccgccgttgcacgatttctactgcagcaggctactggacctggtcttcctgctggatggctcctccaggctgtccgaggctgagtttgaagtgctgaaggcctttgtggtggacatgatggagcggctgcgcatctcccagaagtgggtccgcgtggccgtggtggagtaccacgacggctcccacgcctacatcgggctcaaggaccggaagcgaccgtcagagctgcggcgcattgccagccaggtgaagtatgcgggcagccaggtggcctccaccagcgaggtcttgaaatacacactgttccaaatcttcagcaagatcgaccgccctgaagcctcccgcatcgccctgctcctgatggccagccaggagccccaacggatgtcccggaactttgtccgctacgtccagggcctgaagaagaagaaggtcattgtgatcccggtgggcattgggccccatgccaacctcaagcagatccgcctcatcgagaagcaggcccctgagaacaaggccttcgtgctgagcagtgtggatgagctggagcagcaaagggacgagatcgttagctacctctgtgaccttgcccctgaagcccctcctcctactctgccccccgacatggcacaagtcactgtgggcccggggctcttgggggtttcgaccctggggcccaagaggaactccatggttctggatgtggcgttcgtcctggaaggatcggacaaaattggtgaagccgacttcaacaggagcaaggagttcatggaggaggtgattcagcggatggatgtgggccaggacagcatccacgtcacggtgctgcagtactcctacatggtgaccgtggagtaccccttcagcgaggcacagtccaaaggggacatcctgcagcgggtgcgagagatccgctaccagggcggcaacaggaccaacactgggctggccctgcggtacctctctgaccacagcttcttggtcagccagggtgaccgggagcaggcgcccaacctggtctacatggtcaccggaaatcctgcctctgatgagatcaagaggctgcctggagacatccaggtggtgcccattggagtgggccctaatgccaacgtgcaggagctggagaggattggctggcccaatgcccctatcctcatccaggactttgagacgctcccccgagaggctcctgacctggtgctgcagaggtgctgctccggagaggggctgcagatccccaccctctccccagcacctgactgcagccagcccctggacgtgatccttctcctggatggctcctccagtttcccagcttcttattttgatgaaatgaagagtttcgccaaggctttcatttcaaaagccaatatagggcctcgtctcactcaggtgtcagtgctgcagtatggaagcatcaccaccattgacgtgccatggaacgtggtcccggagaaagcccatttgctgagccttgtggacgtcatgcagcgggagggaggccccagccaaatcggggatgccttgggctttgctgtgcgatacttgacttcagaaatgcatggtgccaggccgggagcctcaaaggcggtggtcatcctggtcacggacgtctctgtggattcagtggatgcagcagctgatgccgccaggtccaacagagtgacagtgttccctattggaattggagatcgctacgatgcagcccagctacggatcttggcaggcccagcaggcgactccaacgtggtgaagctccagcgaatcgaagacctccctaccatggtcaccttgggcaattccttcctccacaaactgtgctctggatttgttaggatttgcatggatgaggatgggaatgagaagaggcccggggacgtctggaccttgccagaccagtgccacaccgtgacttgccagccagatggccagaccttgctgaagagtcatcgggtcaactgtgaccgggggctgaggccttcgtgccctaacagccagtcccctgttaaagtggaagagacctgtggctgccgctggacctgcccctgcgtgtgcacaggcagctccactcggcacatcgtgacctttgatgggcagaatttcaagctgactggcagctgttcttatgtcctatttcaaaacaaggagcaggacctggaggtgattctccataatggtgcctgcagccctggagcaaggcagggctgcatgaaatccatcgaggtgaagcacagtgccctctccgtcgagctgcacagtgacatggaggtgacggtgaatgggagactggtctctgttccttacgtgggtgggaacatggaagtcaacgtttatggtgccatcatgcatgaggtcagattcaatcaccttggtcacatcttcacattcactccacaaaacaatgagttccaactgcagctcagccccaagacttttgcttcaaagacgtatggtctgtgtgggatctgtgatgagaacggagccaatgacttcatgctgagggatggcacagtcaccacagactggaaaacacttgttcaggaatggactgtgcagcggccaggacagacgtgccagcccatcctggaggagcagtgtcttgtccccgacagctcccactgccaggtcctcctcttaccactgtttgctgaatgccacaaggtcctggctccagccacattctatgccatctgccagcaggacagttcgcaccaggagcaagtgtgtgaggtgatcgcctcttatgcccacctctgtcggaccaacggggtctgcgttgactggaggacacctgatttctgtgctatgtcatgcccaccatctctggtctacaaccactgtgagcatggctgtccccggcactgtgatggcaacgtgagctcctgtggggaccatccctccgaaggctgtttctgccctccagataaagtcatgttggaaggcagctgtgtccctgaagaggcctgcactcagtgcattggtgaggatggagtccagcaccagttcctggaagcctgggtcccggaccaccagccctgtcagatctgcacatgcctcagcgggcggaaggtcaactgcacaacgcagccctgccccacggccaaagctcccacgtgtggcctgtgtgaagtagcccgcctccgccagaatgcagaccagtgctgccccgagtatgagtgtgtgtgtgacccagtgagctgtgacctgcccccagtgcctcactgtgaacgtggcctccagcccacactgaccaaccctggcgagtgcagacccaacttcacctgcgcctgcaggaaggaggagtgcaaaagagtgtccccaccctcctgccccccgcaccgtttgcccacccttcggaagacccagtgctgtgatgagtatgagtgtgcctgcaactgtgtcaactccacagtgagctgtccccttgggtacttggcctcaaccgccaccaatgactgtggctgtaccacaaccacctgccttcccgacaaggtgtgtgtccaccgaagcaccatctaccctgtgggccagttctgggaggagggctgcgatgtgtgcacctgcaccgacatggaggatgccgtgatgggcctccgcgtggcccagtgctcccagaagccctgtgaggacagctgtcggtcgggcttcacttacgttctgcatgaaggcgagtgctgtggaaggtgcctgccatctgcctgtgaggtggtgactggctcaccgcggggggactcccagtcttcctggaagagtgtcggctcccagtgggcctccccggagaacccctgcctcatcaatgagtgtgtccgagtgaaggaggaggtctttatacaacaaaggaacgtctcctgcccccagctggaggtccctgtctgcccctcgggctttcagctgagctgtaagacctcagcgtgctgcccaagctgtcgctgtgagcgcatggaggcctgcatgctcaatggcactgtcattgggcccgggaagactgtgatgatcgatgtgtgcacgacctgccgctgcatggtgcaggtgggggtcatctctggattcaagctggagtgcaggaagaccacctgcaacccctgccccctgggttacaaggaagaaaataacacaggtgaatgttgtgggagatgtttgcctacggcttgcaccattcagctaagaggaggacagatcatgacactgaagcgtgatgagacgctccaggatggctgtgatactcacttctgcaaggtcaatgagagaggagagtacttctgggagaagagggtcacaggctgcccaccctttgatgaacacaagtgtctggctgagggaggtaaaattatgaaaattccaggcacctgctgtgacacatgtgaggagcctgagtgcaacgacatcactgccaggctgcagtatgtcaaggtgggaagctgtaagtctgaagtagaggtggatatccactactgccagggcaaatgtgccagcaaagccatgtactccattgacatcaacgatgtgcaggaccagtgctcctgctgctctccgacacggacggagcccatgcaggtggccctgcactgcaccaatggctctgttgtgtaccatgaggttctcaatgccatggagtgcaaatgctcccccaggaagtgcagcaagtgaggctgctgcagctgcatgggtgcctgctgctgcctgccttggcctgatggccaggccagagtgctgccagtcctctgcatgttctgctcttgtgcccttctgagcccacaataaaggctgagctcttatcttgc

SEQ ID NO: 5284 - DNA, 62944 bp, Homo sapiens
gatcctatttctaaggagtaagataataatataacagccggccgggcacagtggctcacgcctgtaatcccagcactttgggaggccgaggcaggcggatcacctgaggtcgggcattcgagaccagcctgacaaacatggagaaaccctgtctctactaaaaatacaaattagctgggcgtggtggtgcatggctgtaatcccagctattgggaaggctgaggcaggagaattgcttgaacccgggaggcagaggttgcaatgagctgagattgcaccattgcactccagcctggacaacaagagcgaaactctgtctcaaaaataataataataataatataatagcattctattaactgtttagtcttctaggacttgcactgtaatgccacagtccatcaggttgttgcacacagctgtgcttcatccattttcaacagaatgtaatatgtcattgtgtgaaattaccacaggacatggtttcaacatccacaaaatgattaacttgatgctctctgaggcgccttttagatatgagaatctaggaccctctgcaccgtcttaacccaagagtttgcttgatggagagcgggaagaataatgcaagttgcatctccaatatctcccctcccctccacagggttttgaaggccccacctgcagccacagggccccttcctgcggcttccatcactgccaccacggaggcctgtgtctgccctcccctaagccaggcttcccaccacgctgtgcctgcctcagtggctatgggggtcctgactgcctgaccccaccagctcctaaaggctgtggccctccctccccatgcctatacaatggcagctgctcagagaccacgggcttggggggcccaggctttcgatgctcctgccctcacagctctccagggccccggtgtcagaaacccggagccaaggggtgtgagggcagaagtggagatggggcctgcgatgctggctgcagtggcccgggaggaaactgggatggaggggactgctctctgggagtcccagacccctggaagggctgcccctcccactctcggtgctggcttctcttccgggacgggcagtgccacccacagtgtgactctgaagagtgtctgtttgatggctacgactgtgagacccctccagcctgcacgtgagcctgaaatccactggagccagggaaggagaggggtgggtgagaggaggaggaaggacgtagatggctctgagttacagtgtggccacagccttgggctccagggagtttccaccctaataaccatcactaaacaggggtcgaagactctggactccaacctagggtaatggggtggcatcagtatttaatgtggggcgtggcctttgggctcctctctaagagttgaaggaactcaggtctcaagcctccttccctaagccttgctgccatggagtatttcccctagcagtcagcacctcacagagggaaaagggcctgggactctcctttagaaacagaggagagcttgggagggtacagagaggggacagtctagggagacaggggtgttagcagacattggggtgtctggactaccatccaggacttgactaagctcattgctccacagctgcccccacttagcaaccaaagccctagagggcacaaaatatggggaattctttctagggtgaagaaaagagtcaggttttagggaggtcctgagtccccctctccttaccccacagtccagcctatgaccagtactgccatgatcacttccacaacgggcactgtgagaaaggctgcaacactgcagagtgtggctgggatggaggtgactgcaggcctgaagatggggacccagagtgggggccctccctggccctgctggtggtactgagccccccagccctagaccagcagctgtttgccctggcccgggtgctgtccctgactctgagggtaggactctgggtaaggaaggatcgtgatggcagggacatggtgtacccctatcctggggcccgggctgaagaaaagctaggaggaactcgggaccccacctatcaggagagagcagcccctcaaacacagcccctgggcaaggagaccgactccctcagtgctgggtaagaagctaggtggagggaagggccagacaccagtttttttaagagggcagagggaggaaagggagccagggaccaatacagaggtctctgaggtgcctcctctacaggtttgtggtggtcatgggtgtggatttgtcccgctgtggccctgaccacccggcatcccgctgtccctgggaccctgggcttctactccgcttccttgctgcgatggctgcagtgggagccctggagcccctgctgcctggaccactgctggctgtccaccctcatgcagggaccggtaggtgaccccttgccactttctctgacctctgttcccaggccagctctcatgctagcaacaggcaatggaggctgaatcaaacaggacagctgagactgaaaatgttctttgtggggacttactttccctaaccccgctttctctaactgaatctcccactggcccatttgttctacagtctccttccttatttccctaagcacattatcctaacctctgtcatagccctccaacaaagggatggtttatcttctctaccagactgagaatacctaatagtctttgtatcagacaattcatagtacatgaaagaataataggctgggcgcagtggctcatgcctataatcccagcacgttgggagaccaaggcaggtggatcacgaggtcaggagattgagaccatcctggctaatgcggtgaaaccctgtctctactaaaaataaaaaaattagccggctgtggtggcgggtgcttgtagtctcagctactcaggaggctgaggcaggagaatggcgtgaacctgggaggtggagcttgcagtgagccgagatcgcgccactgcactccagcctgggcgacagagggagactccatctcaaaaaaaaaaaaagaaaaataactgctatatcgtactttgtgccttactctaagcattttacattgttacctcatttaatcctcccccacaaccccatgaggcacgtactgctggttgagtatcccttatctgaaatgcttgggaacaaaagtgtttcagatttcggatttattttggaatatttgcattatacttactggttcagcatccctaatacaacatccaaatgctacaatgagcatttcctttgagcgttatgttggtactctaaaagtttcagactttggaacatttcagatttgggattggggttatggatactcagcctttttttgtgtgtttgttttctgagacagtcttactctgtcagccacactggagtacagtgacgccatctcagctcactgcaacctctgcctcctgggtttaagcaattctcttgcttcagactactgagtagctggaattacaatggcatgccaccatgccctgataattttttttgtttttgttttgttttgttttgtttgagacagagtcttgccttgtcgcccaggccggagtgcagtggcgcgatctcggctcactgcaagctccacctcccaagttcacgccattctcctgcctcagcctcccaagtagctgggactacaggtgcccgccaccacacctggctaattttttgtatttttagtagagacagggtttcaccatgttagccaggatggtctcgatctcctgacctcatgatccacctgcctcagcctcccaaagtgctgagattataggagtaagccactacacccagccactaatttttatatttttagtagagagggggttttgccatgttggccaggctggtctcgaactcctggcctcatatgatccacctgcctcagcttcccaaagtgctgggattacaggcatgagccactgtgcccaacctcaatctatattatcatccccattttgcagataaggaaaccgaggcaaagacaggctactaaacttgtccaaaggtctcccaatagtaatcagtctcaccaggagtggcctctctttgtgactctgtctctcccaccagcaccccctgccaaccagcttccctggcctgtgctgtgctccccagtggccggggtgattctcctggccctaggggctcttctcgtcctccagctcatccggcgtcgacgccgagagcatggagctctctggctgccccctggtttcactcgacggcctcggactcagtcagctccccaccgacgccggcccccactaggcgaggacagcattggtctcaagtgagaatgaggagaaacccaggctcaggaaggggagtctctcctatggcgatatttacaatcagaaaagataagaaatactattgcagaagtcaaagataggggaaggagagaggggtgggaagcctgctggaaattttggagaccctgatggtcataattccgtgtaacctctacccacccattcctttccagggcactgaagccaaaggcagaagttgatgaggatggagttgtgatgtgctcaggccctgaggagggagaggaggtgggccaggtgaaagggctggggcaagaatggtctggaggtgatggaagggatgaaagggcaaatcaaccttcactgatccttgctgttacccaaaggctgaagaaacaggcccaccctccacgtgccagctctggtctctgagtggtggctgtggggcgctccctcaggcagccatgctaactcctccccaggaatctgagatggaagcccctgacctggacacccgtggacctggtatgtgagtcaacccagaccaagaaaaaaaaaaaaagtcctttgaccctattagaatcagagagtcctttaatatcagaactagaggaaataattttagactgagtgccttagaacaatgattctcaaagtgtggtcctcagacagcaaaatcagcatcacctgggaatttgtcagaaatgcaaattattgggctccactacagagctactgactcaggaatttaaaatgttaggcaatctgttttaacaagcccttcaggtgaatctgatccagactcgtttgagaaaaccactgctaggccgggcgtggtggctcacgcctgtaatcccagcactttgggaggccaaggcgggtggatcacaaggtcaggagatcgagaccatcctggctaacacagtgaaaccccgtctctactaaaaatacaaaaaattagccgggcgtggtggcgggagcctgtagtcccagctgctctggaggctaaggcaggagaatggcgtgaacctgggaggaggagcttgcagtgagccgagatcgcgccactgcactccagcctgggtgacagggcgagactccgtctcagaaaaaaaaaaaaaaaaaagagaaaaccactgccctggaatgtcagagaattaagctgcaggttccttttacagaggaagaaactgaagtcagagaaaagcagaaaagtcacttggctaaagccacacagagccagaacttagcttcccaacacctcaggttttgattctctctgagcttacatgttgtcccttcccccttgttgtgtcctttagattgacccattactctgtcttaccaacagatggggtgacacccctgatgtcagcagtttgctgtggggaagtacagtccgggaccttccaaggggcatggttgggatgtcctgagccctgggaacctctgctggatggaggggcctgtccccaggctcacaccgtgggcactggggagacccccctgcacctggctgcccgattctcccggccaaccgctgcccgccgcctccttgaggctggagccaaccccaaccagccagaccgggcagggcgcacaccccttcatgctgctgtggctgctgatgctcgggaggtctgccaggttagcacacactgaggtccctacagggaatggggcgagcttacaagtaaagctggacagaagcatcccctagagtttgacaaggaggaaattggtgtgattgggaacctgacagggaaactgcggaggatggctgaatatggattgcgagtggggttaatagtgtaaggaactcgagttggcagtccaaggtaccccaggggtcactggccctctgtctccccagcttctgctccgtagcagacaaactgcagtggacgctcgcacagaggacgggaccacacccttgatgctggctgccaggctggcggtggaagacctggttgaagaactgattgcagcccaagcagacgtgggggccagagataaatggggtatgtagaggaaggggtgatgtatgctatagagaagttgagcagatggggtgggagatagcgtgcaaaatataggtgcagcagaggggcattccctctcatcctgctgttacggcggtcaatctgagatgcggtggaagtacgggccgcgtgagtttccccccccaactcccaccctcaacaccacactggccctccgctccagcttactggggaactggcatggaacacagtgtctgtggaaaggggggggaatctcgtggggggagactgtctcccggtctcaccgaccccagaacaatgccccattgtccctcccgcgcactggtgacgtcaccagggcaacacttcctgcaggccggtggtctcctgggcaacgcttcccgcctttgagggaccagccggcccgaatagcccttcccccaaggccagaacccgtgggaaaccggaacccaggcgtctggcccccaactggggtaacaacctcccacgtcgtcccctagggaaaactgcgctgcactgggctgctgccgtgaacaacgcccgagccgcccgctcgcttctccaggccggagccgataaagatgcccaggacaacagggttagatgggacagagggcttcccacaaaacagtcaggcgcacgagagatggaaagtgcggtaacccgcaaagcctgaagggataggggccagtggtcgcgcaagtgaaggcagaaaggcccagtcctgtgggcgtggccttccctgatatcggccctggctcttctgtacaggagcagacgccgctattcctggcggcgcgggaaggagcggtggaagtagcccagctactgctggggctgggggcagcccgagagctgcgggaccaggctgggctagcgccggcggacgtcgctcaccaacgtaaccactgggatctgctgacgctgctggaaggggctgggccaccagaggcccgtcacaaagccacgccgggccgcgaggctgggcccttcccgcgcgcacggacggtgtcagtaagcgtgcccccgcatgggggcggggctctgccgcgctgccggacgctgtcagccggagcaggccctcgtgggggcggagcttgtctgcaggctcggacttggtccgtagacttggctgcgcgggggggcggggcctattctcattgccggagcctctcgggagtaggagcaggaggaggcccgacccctcgcggccgtaggttttctgcaggcatgcgcgggcctcggcccaaccctgcgataatgcgaggaagatacggagtggctgccgggcgcggaggcagggtctcaacggatgactggccctgtgattgggtggccctgggagcttgcggttctgcctccaacattccgatcccgcctccttgccttactccgtccccggagcggggatcacctcaacttgactgtggtcccccagccctccaagaaatgcccataaaccaaggaggagagggtaaaaaatagaagaatacatggtagggaggaattccaaaaatgattacccattaaaaggcaggctggaaggccttcctggttttaagatggatcccccaaaatgaagggttgtgagtttagtttctctcctaaaatgaatgtatgcccaccagagcagacatcttccacgtggagaagctgcagctctggaaagagggtttaagatgctaggatgaggcaggcccagtcctcctccagaaaataagacaggccacaggagggcagagtggagtggaaatacccctaagttggaaccaagaattgcaggcatatgggatgtaagatgttctttcctatatatggtttccaaagggtgcccctatgatccattgtccccactgcccacaaatggctgacaaatatttattgggcacctactatgtgccaggcactgtgtaggtgctgaaaagtggccaagggccacccccgctgatgactccttgcattccctcccctcacaacaaagaactccactgtggggatgaagcgcttcttctagccactgctatcgctatttaagaaccctaaatctgtcacccataataaagctgatttgaagtgttacctttttttggaggaattggggagaagaatgggaaaaaagatgggagtgactgcataatgtcagcattttgtgcttttggctcagcatttggattggatggaggatgtaagtatagtttaaaagcaagaataagtatatttaggggccctatgataatttagggtattatctgaaagcaagaatctagtagccaagggagaaaccgcacacactaggtcaggggtccccaacccttgggccacagactggtactggtccatggcctcttaggaactgggccacacagcaggaggtgagcaagcattactgcccaagctccacctcctgtcagatcagcataagcattaaattctcataggaactcgaaccctattgtgaactgtgcatgcaagggatctaagtttctcgcttcttacgggaatctaatgcctaatgatctggggtggaacagtttcatcctgaaaccagccctccgtcgccaccgaccatggaataattgtcttccacgaaactcttccctggtgccaaaaaggtaggagaccactgcactagatgatgcacacactttgtccctcatcctagggcttttacttatggccacttaggagattcctaaggccacaagtcaagtagatggagagagtatcttgaaactttgtccaccttgcagcaatatgttgctaggtttgaaacatggagtcatgaggcattttgaaagccaataatatctacagtttattaagtattcactatgcatcaagtgctttattacattattaatacatcaaccctatgaagtaggtgctattaaaaccctatttcactcagaaattgaggcacagagatctgcccaagattgcaaggaataagcggcaggaccagatctcttcatcacatttcacattccaaatcactcagctataaactccctaacatgacaggttgccatttagaggtaccaaatggttgtctgccctgctccttccttgatgccaaccagcctgattagcattgatcaaagaccaagccagagaggtagtcctctcccttttcaatttcatttcatttctttctttttctgaaacagggtattgctctgttgcccagcctggagtgcagtggcacaaatggctcactgcagccacaacctcctgggctcaagcaatcttcctacctcagcctctcatttttccatatctatatctcttatgcccaaaataaactttcccctgccccttgtctgcactaaactgtaagtttccaaaatgaacccttcccgtactctatttggtacacatcttgtctcctgaatagagtgtattttttattttattttattttggagacggagtctcgctctgtcacctaggctggagcgcagtggcacaatctcagttcaccgcaacctccgcctcccgggttcaagcaattctcctgcctcaacctcctgagtagctgggattacaggcgcatgtggccacgcccagctaattttttgtattttagtaaagatggggtttcaccatgttccccaggctggtctccaactcctgagctcaggcaatccacccgcctcagcctcccaaagtgctaggattacaggtgtgagccaccgcagccggccatctcctgaatagattttaaatacctagaggtcagggatgattattcaatacatatatattgaatacttactatgtgttggacccggtgctagggttttatgtatatatttgagagctccacatccctggatctgaatcctccacttcccactggaaccatgcccctcccagtcccggtaagtaagagggaagatcgggagggccaaatcctacaccagggtctatcttagggagggaagggacctggctggggggagggggattctgaggagtgaaaccacttcctgtgtagctagttcctgtgttgacagaaagagcagaagaggaggtggggtggagggagcagagccagggattaggggactactgaggctctggagatgagaccgccaggagtccttccccaccatgagccccctccactcctgcagctggaggagtttttcccagtctcagtgctgccctggggcgagagagactgaacaagctgtttgggtgggaagagaatggaggaagttgacagggatgggcggggcccgtgggggggctgaccaggaacccagcttcctgctcagtacccaggcatccagcccccagctcacccccaccccttccagcccccactcccctcaggaacccaaggttccagccctcctcccaaatcccagccacccctcccccaccagtttctcccctctaggggatggaggctgagagaccccaggaagaagaggatggtgagcaggtgagctgggcacggggttggggaggctgacactgggaaagaagggaggtgagaggacctggggcagaaatgtagggacacaggggccttgaaaggcttgggcaaactgaggcaggaacagagacacacagagaggaaacgggccactggcctagccccctgtccactcctcccgcttcaaccaccactgcttgactagaatggacatattttggcatcagggcccccctcaggatgaggaaggctggccccctccaaactccaccactcggccttggcgatctgctcctccatcccctcctcctccagggacccgccacacaggtacccctacccacccagggagagccccgaccctagtgcccacatcctgaccccattaccaaggcccactccattgtgggccctctccccacctcctccagactccccttgggattccccattgcaccccctctcctctgatccaaagtccctaatcacgtcaccctgtccacactcccccacggctcctgtctgccaacctctctgggtctctgagccctccacacccctctccccagccctgggaccccgctcggcctccctgctctccctgcagactgaactccttctggacctggtggctgaagcccagtcccgccgcctggaggagcagagggccaccttctacaccccccaaaacccctcaagcctagcccctgccccactccgtcctctcgaggacagagaacagctttacagcactatcctcagtcaccaggtaagacatccccccaggaggcaaacccaggcctcctggtctcttggcccctgttctctttggggctctactcctgtttctccctaggcaccccatcgccttcacaggtttcctatatgcctccccataccaacccttgatcctctcaagaacctcctcctctcagaccctcaccaaagctctccctctccctccactcctccagtgccagcggatggaagcccagcggtcagagcctcccctccctccaggggggcaagagctcctggagttgctgctgagagttcagggtgggggtcgaatggaggagcaaaggtcccggccccccacacacacctgctgagacttgagccccaaccagcccttccttgccactggtctcaaagctgggcagcccattgcatgccctcaactcttgcttggcaggggtaccagagactgaaagacacggcacaaatctcaatattcatctcccacatcaccttccctgggaactggacagggtgaaagtcctcaaactctgggaacaggcgagatggaacagggatttaactccccgcccacaggtccatgggagcttgaggcagtaagggggatcccaggcacccatctcaaggagtggctgggagtcttttccctaacttgtggggacaccaccagttgtcaagctactaggcagtagggtctgagggctcaggcctccacctgagaggttataacctgagagacagctctacccttcctcccagtaagaagggaaggtgggtgggcacctgagagattaagactattctcccagtcccactaccagcacccccgatccctgagactgaggggtttacgggctgtgaatggaccttcagccctgcccaccctccctccccactgctgctgagtctgtctgatgttttggttgtgtgaataaatataattcccctctggactgcagactggtatctggggggcccaggcggggtgaaaggtaggaaggtgaggccagaggccttttctctccccagtctggccagaggccagctcccctccccggctggttaattactggctcattaagcagcggctggagacctccctaattatctcccccagcccccctcttcggttttaattaagtagaacagggaggggagtcattagaacaagaaatacgaactgagctgccggtgaacccaggcattccagcggcctgagtccacatcgcttagatccctgattcaggacccaggtgacagacgcccccagccgccaacacagccccactcctaggccgcggaagtccagccagggggctttcccatatctttcagatggcccgtctcctcccctcatcccctcttccctctcccctcctccactaggtctcagttcctctgtttctgtgtctctctctccgcccccagctcctccctgttcctcctctcttctcccctcctcttcctctccggctcccctcccccagcctccctccctcgctccccccccttctccctcctccctcctccctctctctcacacacacccccgcttgggcctcctctctctctccggctccattttctccgccgccgggggccggggtctcctgtggggggcccagccggtatcccaggtctcccttcagtgccggggtgaacccccgggggagccgggagccgggggcagacgggcgggggttggggcggagggagcagcggccccagcgagtttggggggagaagtaaccaggcggggggaggggcggagcagggagggggcctcagggcccccccccagctatggacgaacggctactggggccgccccctccaggcgggggccgggggggcctgggattggtgagtggggagcctgggggccctggcgagcctcccggtggcggagaccccggtgggggtagcgggggggtcccgggaggccgagggaagcaagacatcggggacattctgcagcagataatgaccatcaccgaccagagcctggacgaggcccaggccaagtgagtgcccccactccgggaccccacacagacccagcaaaccccgttcacatgttctgaatcttctgggagccccccccaactccagggccctctccaggatccaacagctctcttctctccttattcctgggagcccatagaaaagtgatccctctcaaacctcccttcacccccaggccctgaaaccttcacagagggaacccccggtggcccggctccccactcctaaccttttgccgacccctgcagtctcctggaacagccccatccccgggagccccctctggctcccagactaagaaactgttcttgggctacgttatcttctcccctaactctccacccagccccctcattctctccagatgtggagacctccacaccctctccagagcccctaaagctcctctccactgctcagccagacactaggtgcatcaaagcctcccacctgctcagccccaggaccccttcacacaccctacactgatctccccagttagctcggcacccccagccccactctgccacctcaaactctgactcttctcaaccccagcttctgtctctctccctctgaaacctaccaagtcactttcctttctccatccactcccagattcctcctcctacctttctagaccatctcccaaagcccgcagcctttaacctgctgcctgcatcttccctgtgtctccctgaagctgaggagcttccccatgctctgggagctgatcttttcccaagaactcctcattccacccccaactcattccacccccaatccgcttcctccctccgcagactgaccctcctccctccttgttctcaggccccctgctctgtttctctagctcctcaacttttctctttccccactcccactcctcccaaggaaacacgccctaaactgccaccgaatgaagcctgctctctttagcgtcctgtgtgaaatcaaggagaaaactggtatgtgggccccccccggattgctcaactctgggaacagaaccctgttcattatagggctagagtgtgacaacttggggccctgaggaaagtaaggagtcagggggactggggaaggaaccaaagcctgggaacttggctctccaggaagcaccaggaggactgagcactgggtattggggtctctgggtccctaagtccactcgcctgcatgctaggcctcagcattcggagctcccaggaggaggagccggtggacccacagctgatgcgcttggacaacatgcttctggcagagggtgtggctgggcccgagaaagggggcggctcagcagcagcagctgcagccgctgcagcctctggtggtggtgtgtcccctgacaactccatcgaacactcggactatcgcagcaaacttgcccagatccgtcacatataccactcggagctggagaagtatgagcaggtaaggagaggaggcttgggtgggtggagggaagggctcttgcaggggaatcccatggtcaaagggctcctcctcaccagcccactggcccccactacaggcatgtaatgagttcacgacccatgtcatgaacctgctgagggagcagagccgcaccaggcccgtggcccccaaagagatggaacgcatggtgagcatcatccatcgaaagttcagcgccatccagatgcagctgaagcagagcacctgcgaggctgtgatgatcctgcgctcccgtttcctggatgccaggtgggcccagggaccccaggctggcccccagcactgggctccttcccattcctctccaagaccctgagctgccatgctgcacaacatggtactccatgacaatggtgactctggggtcatgccatgtgacagccctgccaggacatcaacatcctcctcaccgctcttctccctcctctgtagacgaaagcgccgtaacttcagcaaacaggccactgaggtcctaaatgagtatttctactcccacctgagtaacccatatcctagtgaggaggccaaggaggagcttgccaagaagtgtggcatcaccgtgtctcaggtattatggaggttgcgggaggagttgtcaggcaaagtgcacgcatctcagctaggtgcagtggtgtgttcctgtaatcccagctactagggaggctgaagtgggaggatcacttgaattggagaccagcctgggcaacagcatagtgagaccaggaagcaaaaaaaaaaaaaatgctgtcactcacatcttattcagtgaaggacttcagaggcaaatgtttctacctgaccctcctttctgccccacaggtctccaactggtttggcaacaagaggattcgctataagaaaaacatcggaaagttccaagaggaggcaaacatctatgctgtcaagaccgccgtgtcagtcacccaggggggccacagccgcaccagctccccgacacccccttcctctgcaggtggatcccactgtcaccccagctgactgttttgcacacttcctgcttttgttcccacttcctatctaggcaggatcatagcagagagggggccttttggggtgagagggaccgagctgagataggctggagatgtcaggggacagaggccattccagtgatcttagttctgcctttcttcccacgggtggccaaggaacagcctgctctttctgtgtgttggaatgttattttgtggataattggagtatagtagcatgtccccacaagagttgagagttgtggttcatcctctaccatcacgggctctattacactcttccctctctgcccccacaaggctctggcggctctttcaatctctcaggatctggagacatgtttctggggatgcctgggctcaacggagattcctattctgcttcccaggtcagatgcccatctcctctcgaatagggctttccccaactccatttcctctactttaggatacaagacctctttcctctgaggcttctcttcactgtcataccttcctctgctgcctgcaggtggaatcactccgacactcgatggggccagggggctatggggataacctcgggggaggccagatgtacagcccacgggaaatgagggtgagtggatcctgaagctcctctctgtccagttctcacaggacagaggggcattttccctagtaatgttgtgcccacacagggttcccagggctctctctgttttctgtactctgtctctcctttcaggcaaatggcagctggcaagaggctgtgaccccctcttcagtgacatccccaacggagggaccagggagtgttcactctgatacctccaactgatcttgcccctcagggtcacaggggtgggggctctcacaaggcgacttgaagaggacgcaggcttccagaggacaaaccccaatacaggagaagcacaagacagagaagggccaatggggtcatcccctccctaacgagactctctgtgctgggggtgctaattacatggcaggaagaatggggcctctaaggggagtgtggggtctgtctctcccttttttccatctttttcctctctcgctttctttcttacacagaaacatacacataccgagaaacctatttctcagacccctttttctcctctgtctttctctctccctctcccacacctcacacacacatactcccacttgcaactattctgtttctctcctgggctcccccactttcccttccccaccccacttgtatgctctggaatctgtggagacgccagccctgcccaatcagagatgccaaaaatggggacatgacttctggacagaggacatgggccacgcccccatgcatccccacccccgcccctccggacggcttacttacctcatacgcagctcatcttaaaccaatagaatcgctcggtggacgagagtgtctgactcagatatctacctcggagggagtttctgctactttagggaattattgactgggctttggggttgaacttttttttttttaaagaaagaaaaagaaaccctgggatccatctgttttttttgttgttgttgttgtttttgttgttgttggtggtggtggtggtggtggttcttaatttttaatttagtttggggaagtagcttgtttttttttttataaatatgttgatttcttgtcttttttttttatttcttactttcccatattaggggtgatagccaaaggggttctggtaagagaaagggggacaaacagaactggtaaagaggcccccctggctccaggcctgtccatcaggaagtaaattttacagggcaccaagctttgccccctaaaatcccttaggtgttctttgttcatgcaggcaggtttctgccgcatttgatgtggaggcagtgaagggcttgccctgctggcctctcatcccccttcttcccacaacccttgggcagggctggactcagtaattttgaggaaattgaagatgccatcttcccctgtgagtgacatgtctttaattttttaaaaaactactatttgaaaattggagggggaagaatgggaagggagttattgccaaatatgttaaatatgggttggggtgcttgtatatgtatcttcctcaatttccccataaatgaggtatctttttgtcacaccaaaatcaaggggtagggagagggaggaggttgcaaaaagccagatgtgggggaaaagtaacatcaacactgtcccatcctcagccctgaactagctaccatctgatcccctcagacattctcaggattttacaagactgtcagagtggggaacccctcccattaaagatccgggcaggactggggacaggttggaagtgtgatgggtgggggggtgggaggcatgggccgggggcagttctctcctcacttgtaaacttgtgtagtttcacagaaaaaaaacaaaatgcagttttaaataaagaaatttcttttttccctgggtttagttgagaatttttttcaaaaaacatgagaaaccccagaaaaaaaatgattttctttcacgaagttccaaacaggtttctctcctgttccccagccttgccttcatgatgcaggcccaattgcacccttgcagacaacagtctggcctgaaccctattgatgcaactttgcgcaatcaagatggggctccagtgggtcaccaggcagccctgatggactgatggaataaataggatcgggggctctgagggaatgagaccctagagggtacactccccatcccccagggaagtgactgtacccagaggctggtagtacccaggggtggggtgataattatttctctagtacctgaaggactcttgtcccaaaggcatgaattcctagcattccctgtgacaagacgactgaaagatgggggctggagagagggtgcaggccccacctagggcggaggccacagcagggagaggggcagacagagccaggaccctggaaggaagcaggatggcagccggaacagcagttggagcctgggtgctggtcctcagtctgtggggtgagccactccctcaaccccactgaccctccctgcagaaagcactttaaccccacaccccagtcgtcctagaacttttcccagaacccgaggaagtgcctttcaaggtccctcacccaccctgtccaaattttgttagccctcattcccttcctacccctctaccatggtgctatctcccaggggcagtagtaggtgctcaaaacatcacagcccggattggcgagccactggtgctgaagtgtaagggggcccccaagaaaccaccccagcggctggaatggaaactggtaagcggggctcctgttgcagcctcccaacttccagggagaccagcaatgatttggatccccgtcactctgcctcacagtcctttcccaaaggccttgcactgtttaggccctgcttctctgcttctagaacacaggccggacagaagcttggaaggtcctgtctccccagggaggaggcccctgggacagtgtggctcgtgtccttcccaacggctccctcttccttccggctgtcgggatccaggatgaggggattttccggtgccaggcaatgaacaggaatggaaaggagaccaagtccaactaccgagtccgtgtctaccgtaagaattccagggtcttctccaaggcctccctcttacctaagaaaaagccttcaaccccagccttggcccatgagggcctctgacttccactggcctcatttccacacacagagtttgagaaccttcacaattacagcctctgactggatttttcctccttcagagattcctgggaagccagaaattgtagattctgcctctgaactcacggctggtgttcccaataaggtagtggaagaaagcaggagaagtagaaaacggccctgtgaacaggaggcgagtgtgtgtgggtgtgggtgtgtggcatctctcattttcaaaggattctgaggtcaccactctttccccaggtggggacatgtgtgtcagagggaagctaccctgcagggactcttagctggcacttggatgggaagcccctggtgcctaatgagaagggtgagtcctaaggtgccccccaagctgccttctccctgatctcactcccacacccaccctgggataatttgtcttatcctcccatcataggagtatctgtgaaggaacagaccaggagacaccctgagacagggctcttcacactgcagtcggagctaatggtgaccccagcccggggaggagatccccgtcccaccttctcctgtagcttcagcccaggccttccccgacaccgggccttgcgcacagcccccatccagccccgtgtctggggtgagcataggtggggagggccccaagctcacgtgagcacgttctggaagtctgacccttagggaaagagggagtcaagcccatggccactgggatcactcacaagtgtaactctccacctcaaaacccttccaactcccagagcctgtgcctctggaggaggtccaattggtggtggagccagaaggtggagcagtagctcctggtggaaccgtaaccctgacctgtgaagtccctgcccagccctctcctcaaatccactggatgaaggatgtgagtgacctggagagaggggctgggaggtagggtgaaccataactagcaacagggagggcagagggctaacgagggaaaggcaggctaggagctgaggaggaagagagggtatctgaagatatggagacaaaaagacaagggttttgaaatagtctcctctccccttcccccaccagggtgtgcccttgccccttccccccagccctgtgctgatcctccctgagatagggcctcaggaccagggaacctacagctgtgtggccacccattccagccacgggccccaggaaagccgtgctgtcagcatcagcatcatcggtgagacctctccccaagccctacagaccctgggactagggtgcaggacagcacaggctctaatttcctgccccattctggccttatccctaacagccaccccacctctccctccatgcacccacacccaagcctcccctaccccacccaaattctgccaagagagcagccaagcctctcccttcttccctctgagctaaaaaaaggaacagacggctgggcgcggtggctcacgcctgtaatcccaacactttgggaggctgaggcgggcagatcacctgaggtagggagttcgagaccagcctgaccaacatggagaaaccccatttctactaaaaatacaaaattagccaggcatggtggcacatgcctgtaatcccagctacctgggaggccagctacttgagaggctgaggcaggagaattgcttgaacccaggaggcatagattgcgatgagccaagatcgcaccattgcatgccagcctgggcaacaaaagtgaaactccatctcaaaaaaaaaaagaaagggaaagactccactggggctcccactaaataaccctctctcaacccgaagtcttcctttctgactggatccaactttgtcttccagaaccaggcgaggaggggccaactgcaggtgaggggtttgataaagtcagggaagcagaagatagcccccaacacatgtgactggggggatggtcaacaagaaaggaatggtgagtggtggtggctgtgctctcaattttccctgtctccgtacaggctctgtgggaggatcagggctgggaactctagccctggccctggggatcctgggaggcctggggacagccgccctgctcattggggtcatcttgtggcaaaggcggcaacgccgaggagaggagaggtgagtggagaaagccagacccctcagacctagggcttccaggcagcaagcgaagaggggtcggggggtggaacgacaacgtgccgcattccccccaatctttctcctcaggaaggccccagaaaaccaggaggaagaggaggagcgtgcagaactgaatcagtcggaggaacctgaggcaggcgagagtagtactggagggccttgaggggcccacagacagatcccatccatcagctcccttttctttttcccttgaactgttctggcctcagaccaactctctcctgtataatctctctcctgtataaccccaccttgccaagctttcttctacaaccagagccccccacaatgatgattaaacacctgacacatcttgctcttgtgtgtctgtgtgtgtgtatgagacacaacctcacccctatacccttgagggccctgaaggaaagggactcacccccatacttcaccatactataccaaacatctactcaagttggggagaagatgcttctgtcgggggtgggggcgaacttgggaagagatcccatcaatatatttcaccttttttattgaatttgtattaaaggaggtagtgagggggcggaagcacttaagagtcagaatccatattagactctggggagtgaaaaattaaattaaatcagtaagatggggagtgggggaagagtcagagggaactttgcccacctttgaagatcaaatcaagaaatcagggaaagcaaagacttaggagaggagaaagacattctctcaatccatcctccttccccagggcagagaattaaacaacgttactgagtgagcctctgagcagaaggctctcccatctatgcacagacttcactcctcctccccaggccttcctggacaatgtccagggctggccttagccaacagaaatagaggggtcaagggggtccaggagtacggaagggtcagcagggaccctcaatactgattcttctctggctggaggtgggcaggaagcagacatagctcaaatactgagcagccaaaaaaagaagaagatggcgagaaacaggaagagggaatcctgccagctggaggctgggtgaccctgtcccagatccacacctgtgggagagaggaaagctgtggaagcatatgctcctaggctgggagggggcctgaggggattcacagggctccctgatgggagctgagtgtgactcttacctgtaccccggcggaaaggctcatgggcattgaagacggtggtgaaaaagccaaagggaaaagcaccaacaccaaatgagaagtggaagcccccggtatcaccaaatggctggaatccctagggaggcagaaaaagtcagacgggaagccggcaaatctgtcaaggaagggacacaactggacaagaagactcacccctctgctctccggagctggtctctggccctgggggcggggtggagtttttaatctgaggaagtggagagagaaagttaacagggatttttctcctcccatcttccacaccgttttccaagggcagaagccttcaatcttccctaagcaacacctccagtctctcacctgggatcctggggcttctggctccctcgcccataaagcgggacaaccttctctctgctgatcccagctttacatactggacactcttgccgttctggccgtgtctccagccactggggagaaaaaaggtggtttccagtatacaagagggtcttacagctcctcagacctccccatttccctcttcatctcctgagtacgcacctgatgaagacatggccaactggatgggggagaaaaaaaaaaaaaggtcaaactagctacagaaaagagagacacagaccctagacttcgcagaatcccatctaacccctcttcccaagcaacctgctgttgcttttcagattttctgcaacctctaccatgccagccaacttagttagccttcctgcttgtctgatcttccaacacctaaagctctgtccatcctcaacacactcaaccctctcctttctcctctccccaacaaacacatacaaattttcgtgccctctcttttctgcctttcaagttaatttctaatttccttcagccacctctttctgggtctcctcttttcaaccccaaccccatcactccaaaccaaacccctttactagcacattcccccattactcactttcaagctcaataatgtccctatctttatgaccctttaacctttcaagtctgcctctccacagtgcccttataccagccccctcccagatctcatctgaatgtgatccatatttcctggttctccccgactcaactgatgcgtgcctcccttaacctttgtgtctcacttgtttccacctgcacagctaagacccctcacttctctggggtaaggtggctcgggtctcacattgtcctgccactccccgccccaccttctcttctcagcacatcacgtgcctcagctcctggttcctaagacctttctttccacagatctcgaccgttatactcccacccacacataccagcaaagtcttatgtctcctgtcgggcttcacctatgggaacgtgccctccgattatctgtatgactgtatgattattcgctcctagcctctccagtatataagcgagacccaccacctcccgcccccctcctcgattctcaccagtacaggtggccacacacactgaccacagcttcccgagcagtctccaaacatatattacattcgaaggtcgcgcccgccccgccccgctcgcgatttggcccttcggggcccccgtcctcctcctccgctgctgccatggccggttttgtttcgccccacgtacccttcagtccccccaaatacacatacacacgccccaacaaaccagaaaccacctcctgcccacgatcgttgggcaggcttcaaggtttcctaatcactattggtctgaatgcctgccagtcacaaagaattcaaaagaaaggattggcccaaagggtaggggcgggaaaaggttagtgcagtcctgccttcgcacaatggctattggctgatacggtctaagtcaatgtgcaatgccaagggattggtaataactcgctacacgctgtcgcctggccaaggagggctttattcgtctgagtagttgtcagtcataaccaaagccataagcaatttgctcgggactacctatagacctcgcccactataagcccctttctttccttcgcttcctcttttagagaatgtccggattgctattggactttggagcgtatggctccaaatcaactcattggctaaaacttgacggaaaatggtggttaggtaaaacgcgcctgcgcagcacgcggcgggacgggggtgggccaatcctgtgagggtttaaccttctcttgttccacctcttcacccctatcttgtcgccatggtgactgctctacaattggcgaggcttgcacttcaaagtcctaggctcgcttcatccgggtccttcagctgtggactttctgctgattgggccttttccttttcccctgattggccgacatcgggaaagacggcgaagagctaggaaaagagggaaaacactagggtcgcagggttcaaaatggctccaacctcctttggtgacgtagagagcagaacttgggtctgcccctcccttttagttaagggagcagaactgggattagcccgacgtttggatagtgggaacatcgatctgcggcgctggtgttaacccaactcattcggctggacgactcagccctccccatattaggtgatttacagagcaaaactgaactaaaggcccacccctttcttaatgttgtacacagagtagaacaggattgacttcaactccgttttaaaccttcagagcaggaaagctctgggctcaacccctttgtgagtggtgcaaaagggacaaagcccgccccttttaaggagacccgcggaggctagacccgccctttcctctttataatttgcccatcagaaatagggtcttcttcccaggttggaccccggggagtttgggcttttcctacaatcactgaccctcactgtgactaaaggagcagaattaggtaacagtcctcccactaccaatcctcttcccgagggcatgtaaactaatgcagggtaaaggtgtggctagaggggggaccttgataaaagatcccatgtgactcaagagtaaggaaagatgagaagttagcagttgcgtaaagaaggactggggcagatgaggattcaggaagcttgaggtttaggaaggaagatattgagagggaaaggtggaaatgaaggagagtgaagtgatggaatgatcctagtaaagggataatgggagtggaggaagagaagagggggtggaaaactagatacatggctaccaaattaaggaggcacgcgcattccagaggaatcggcattcttcctcactttttatttttctagaaagcacccctgaagccaaatttccattggaagaaaagatgtacccatattgtatgttgtgagaaggggttgtctcagcttgggcaagtaaggagactgatacgaaggaagtaggaaagaaaaggtacagaggtaaaagagcatggaaaaggaaagggtcagggataaggccaaagagatctcttctctttaaaggccagagaaggcaggtggaggggggagctggactgctgggagatagtgagggacaaagggcaaaggaaaccagaccagaggactggagagtgagatggagtgagatggagtcctggagagaaaaagaagagaggtgaacttaatgcttgtcatatggtaggtagatgcttgataaatgtttagaattgaatgggtacgggaaaaggggtccttaagaatagttggggggaataagcagcagataaccggagttgagaaaaaaagagaccaagtaaaagtggcagttaaaagagagctgatggagaataaaggaaggaatgtgcggaaggaggaatacagcaccaggggatccagagctgaaagggagttagagaaaaaaaagatgcagctggagccagagatgggggcaaagaccgagggagagccctgggccggggctcgcaagaggacactggtagatgtggggaggagatgccagagtttctgggagacgattggcaaaacaggctgcccatcaccgccctccacttcctggccggccccggaaaccagcaggcgttggggaggggtggcgggggaatagcggcggcagcagccccagccctcagagagacagcagaaagggagggagggagggtgctggggggacagccccccaccattcctaccgctatgggcccaacctcccactcccacctcccctccatcggccggggctaggacacccccaaatcccgtcgcccccttggcaccgacaccccgacagagacagagacacagccatccgccaccaccgctgccgcagcctggctggggagggggccagccccccaggccccctacccctctgaggtgtgggcgggaaagggatgggaggaggagggaagagggtgctgaaagcgactaggatgaggggaaggggagagattgggtctgggagggccgactgggggagagggttgctggggaaaggagaggggccgactgggaagagggttgctggggataggagaggggacctgagagggaggaaggatggaagagacctgggagggaggagaaatggaaacccttgtgaatttgggactgggagcgtgcacagggaatcctggagagggaattccctacaccttccccaattccttttcttgccctttgaccccacatgactcttgaagggtcatgaggggagaaggccagcagaatttgcctcttaggaatacccttaggtgcctctgtttccatctaggcacaggacctcttgtttctcagtggccttccacactgctagacccttactgacacacaaatgccttatgggagccatgttttctacattgagtctgtgtgcctttgacatgtttaatggcttgtgtgcaactaggttgtcccaatgctatccataggctgtgtagaaatggtgtgttattttctatcagaattgcccattcttcattcttgtgtccatgtctcacatccagttttgacatgttttaagtaccgcatgtgtgtgagttttcatatattgcacctgttctataatttcatgttacttgcacattttatgttttggcatgtttatttcagcatgtgaaggttatataccttattttgctttggctgacatgtccatggtcctaccatttgcagtagtcttcatgtgtgggatcccatggcttggctgaataccccacactctgatgtctgactgaattggcctgtttgctgtgttttcccagtcacagttcacagaacacatgtgtatgcgcctttgcatgatacactgatgtaacaggaccatagaatgtgtgttataaatttgtcatcagtatattttgtgagccgtatgctcattaaatttggccctccattgcatttctaaatccttggacttttgttctccaaagagggtcacttaatatcaagtgttaagagaagaaggtaactgggtctccaggtctgcaaagaaccatccctgcatgccttaccttggtgacctccctggcccatacctctctacacaaacattatctttccagtggctgtgtacagtctgtgtccatgagctcaatgcatgtcacagggtcaatcctgctgtgaaccccattgttggtatttatttatggacattatcctccattctttgcactgttggcacacatttgatgagagcagcatctttccctgtggcatcttgatcccattcggtacatttctcttgtgagatgacctcttcctgattattgttactctgccttcattatggctatgtattgcatgtatctattcagagtcggttaccattaggcttggtgtgttcgttactttctcagtgacttcttttagtagtcacttctactcaagaggataactatctaatttgtgatcagaaccgccatctctgtcattaactgtggctctatgggtgggtatacagccttagaatctgttcagcaagtgtttattgagcacctactccatctcctattgtcctggcactggagataagacagagtccctgtccttaagctgcttacagcctaaggagggaaacaaaaacgccagtcaacacatagtgtgttgtcaagatcagtggttcttaaattcaggcgcacatcagactcaccagagggcttgttgaaatacagattgctagccagccacgatggctcacacctgtaatcccaacagtttggaaggctgaggcaggaggatcgcgtgagtccaggagttcaaaaccagcctgagtgacagagtgagaaaaagaaaaacagattgctggacctaatgcccagaatttctgattcagtagatctggggtgaagtctaataatttgcatttctatacttcgagacccgctgatcaagataaaagtgtaaggaaagcacaggcctggaggggttcaggcagccctccaaaaggtgacactgagctgtgtgaggcaggagaagagacaggcattccagccaaagggaacagcatgttcaaggtggggaagcatgaaagatcatggtgtctgaggaactgaagtgaatcagtttgactggaacaaagagttttgtgaggatgtggtcgaagatgtaagcagaagtcaacttatcaagaagagcctttaggcaagacagggaaatgctctgtgtttcagaaaaatctgtgctaacagaaaaatctctgtggttgctacgtggaagatggattggagggagttgggagcctactccacatagttcaggggagaaatgatgctgttctgaacttgtaggggcagtgggatggagcagctcagaaagcctacggtattccaactggcagggtctcctgtttcctctattgcctgttaccttctcgcttggcaataggcttacctttgagcatagcccttcccatcatgggaagacagtgcctgtggcctcagtaggaatgacaggtatttgcctgaacaccctttttgtgaattgttaccctgcccccaacactggggcagagtggaggaaggaggaagaacctagaacacaggttctgtgttcctgcctctcttcctcttgagccctttcctctcccagggcaagtgctgttaggtcacctttactccattccctccttttttcacttggtgaggcctcacacactgtacctgcccacgcaaagtgtcactagaaggaagggaaagggtagtaggattcgtttgcctgtctggaggtaggattggtctttgtagctattccaggtatgtccataagtttacctaggaataggggagctgcctgggtggagagggatttttctagttatgcatttacattcttttatctgtcactgggtgtaattataaatttgtgtctatgtgtgaacatgttagtctttgtatgactgtgtgtctgttggcattagtgacacgaacttttaatcttgccatttggcccttgggtatatggctgtgagtgttctgtcacaatcaccatatatgctgtgtgctgtgttcgtatatatatatgcaatacataccagtgtcagcgtaatggagtggttaggaacacaggcggcttagatttaacctagaaactgctgtttaggagctgtatgacctcaggtaagttatttagcctccctgggcctatttcctataaaatgtaaatagtaatagtactttctagactatcatatgcatcattttaagagtttaacttaatgtatagaccagtactgttctacagaaatataatgcaagccacaatgtaatttttttatggtagccacatttttacaaggcaaaaagagtgaaattaattttagtaatatattttcttgaatctgataacatccaaaagattataatttctttttttttttttggaaatggagtctcactccattgcccaggctagagtgcagtggcgtgatcttggctcactgcaacctccgcctcccggattcaagcaattctcctgcctcagcctcccgagtagctgggattaaaggcatgcgccaacaggcccggctaatttttgtatttttagtagagacggggtttcaccatgttggtcaggctggtcctgaactcctgacctcgtgatctgcccacctcggcttcccaaagtgctgggattacaggcgtgagccactgcgcccggcccaagattataatttcaaaatgtagtcagcataaaagattagtaatggatatctcacattttgttttttattcagtctttgaaatctgatgtgtattttacatttccagcacatctcagttcagactagctgcatttcaagtagccacatgtaggtggtggctactttctcggacagcacaagtatagaccattataagacccttaccagctacaagtgttagctattattcttgttgtcatttattatcaggtatctgtgaattgtagatgtctgtgtcttgtgtctcttgtctgaatatatccggagcctttgggaagagtggtgggagagcagtcctgagctctttctccaccaccctcatcctagagagccttcctgggaaggtttcaatgagacccctgccccagtttgtgtctcaggcccttgtcctcatagcaccagcccccagccctgccttctgtgccttgcctaccccactctcctccagaaaccaggctgattgtcccttgccccatcccctgcaggtggccagaatggatttgtggccaggggcatggatgctgctgctgctgctcttcctgctgctgctcttcctgctgcccaccctgtggttctgcagccccagtgccaagtacttcttcaagatggccttctacaatggctggatcctcttcctggctgtgctcgccatccctgtgtgtgccgtgcgaggacgcaacgtcgagaacatgaagtgaggggcaaggggtcttgggcaatgagggaacctaagggtacaaagtgagtagtggattgggggaagggggcatggtgtgtgtagaaaagactgagagagaccagagacagggaatggggagaggactgcaaaggtggtcagaaagacagtaaggtggggggagctgaggcatgcagatggacatcaatggatcccactgggaccccttgccatgaccccacaggatcttgcgtctaatgctgctccacatcaaatacctgtacgggatccgagtggaggtgcgaggggctcaccacttccctccctcgcagccctatgttgttgtctccaaccaccagagctctctcgatctgcttggtgagaccccaccacagggcacacctcccccagccatgcctcccctcctgaaaccttccctagaatatcttctcctagagatcctcaattccccttcctctgggacattgcccccttgcctcccactcaggccttcattccctgggtagaactgccctcataagcagggtacatatacttttggtcaccctttccttcacttggggcccccctccctgcctagtctcctccttcacctccagtccctaccagagggtgatgagctgggtgaggtgggttgccttctgtgacactctgcctccaccccgatcctcacccactcccaccctgcccaagggatgatggaggtactgccaggccgctgtgtgcccattgccaagcgcgagctactgtgggctggctctgccgggctggcctgctggctggcaggagtcatcttcatcgaccggaagcgcacgggggatgccatcagtgtcatgtctgaggtcgcccagaccctgctcacccaggacgtgagtcatcctggggaaatgggggattggagggatacagagtagaacagttgtaaataaactgatatgcagggccagtgggcctcaaaggtcccattataacatcacacctattctgactcctccatatgtatttgtcttctttgaccctctttctcccccaggtgagggtctgggtgtttcctgagggaacgagaaaccacaatggctccatgctgcccttcaaacgtggcgccttccatcttgcagtgcaggcccaggtgactactgctcttcgttctgctactcagctgccaacccccaccattccctcatctctgggcaggggcttattgtaggagtctctgaagagagctgtggactgacctgctttaacccttccccaggttcccattgtccccatagtcatgtcctcctaccaagacttctactgcaagaaggagcgtcgcttcacctcgggtgagggctttgagcagttctggggtagggtgtgtccggagaggctgggaggacatccctgtgaggcagggggatcattcagtgtcagagccatgagatgtctacacagtcatctagtctaaccccacatcagccaataagtctttactaagcacccaccataccctgccagatgggtagcacttggtcccaccaagagaggctgttactaatcttaacaggaaagataaggcctgtgtgcacaaagctgtaatgaataacactcattcagcagtaaatgccaaacccagaggaggggggctggaggggtgctgaggagatgtctgaactggggattggagaaggctttgtataggagaagggcctcagaagtggcagctggcaagcccagggatggttgtccagggttgggggaagagaactgaaaggttgaggaagagtatcactcggaagctgggccccacctgtgggcaaagacctgggtggacaggccatgatggtgctccccttgccccaggacaatgtcaggtgcgggtgctgcccccagtgcccacggaagggctgacaccagatgacgtcccagctctggctgacagagtccggcactccatgctcactgttttccgggaaatctccactgatggccggggtggtggtgactatctgaagaagcctgggggcggtgggtgaaccctggctctgagctctcctcccatctgtccccatcttcctccccacacctacccacccagtgggccctgaagcagggccaaaccctcttccttgtctcccctctccccacttattctcctatttggaatcttcaacttctgaagtgaatgtggatacagcgccactcctgccccctcttggccccatccatggactcttgcctcggtgcagtctccactcttgacccccacctcctactgtcttgtctgtgggacagttgcctccccctcatctccagtgactcagcctacacaagggaggggaacattccatccccagtggagtctcttcctatgtggtcttctctacccctctaccccacattggccagtggactcatccattctttggaacaaatcccccccactccaaagtccatggattcaatggactcatccatttgtgaggaggacttctcgccctctggctggaagctgatacctgaagcactcccaggctcatcctgggagctttcctcagcaccttcaccttccctcccagtgtagcctcctgtcagtgggggctggacccttctaattcagaggtctcatgcctgcccttgcccagatgcccagggtcgtgcactctctgggataccagttcagtctccacatttctggttttctgtccccatagtacagttcttcagtggacatgaccccacccagccccctgcagccctgctgcaccatctcaccagacacaaggggaagaagcagacatcaggtgctgcactcacttctgccccctggggagttggggaaaggaacgaaccctggctggaggggataggagggcttttaatttatttctttttctgttgaggcttccccctctctgagccagttttcatttcttcctggtggcattagccactccctgcctctcactccagacctgttcccacaactggggaggtaggctgggagcaaaaggagagggtgggacccagttttgcgtggttggtttttattaattatctggataacagcaaaaaaactgaaaataaagagagagagagatctgggtgttggtggttgcatttgttaaggaattgaagcagttcttgcccaggcaacctgcccccagccagaagactcaggggcaggccaagaacacaggcctccccctttcttcagctctctgaagtttccattgttcattgctctttggtggctgatagccttatctgcagctcacagtcggccaatcccagaggattagtgggtccggtttctgtataaattagggggcaggggtgctgtagaggcttcttatcgatgattgacgccgaggcccaggctgttgtcctcacaggagcctggttaatgacatggcagacacagtggctgtggtcagcctggagtggactacactgccactctcaccaaacaataagtgaaactgttgggctggggacaggatttcagaagagaacgatggtaaagtggagaggcatgaggatagtgaatgttggagaggggcttggaggaaagagggaatgcctgaatggagaggggtcttggggaaagttggggaatagaagtcaaggcgggaggagtgtgaggactcacaggcacctagcctctcctccagcagcagcacctggtcgctgagagattcgatccggtcaccccggccccacagctcagccacctgttctggctgcagctcttcaggcggcacgggcagcaccgctctgacccaggccccagcctgaccggcccactagaaaggaagagatgcctcagggtattgacagtgacgtctggcctcgccccacccagcaggcttggctcacctgctccagccgctccaggcgccctcgcagctcgtgaatctcctgcttcagagcgcgctcatctttttccgcctcccgaactagggacaaaggagaccaagagtgtgaccactacccgagcccggacgcccgtcccgagtccctcgggtggcccgtactcctgcccactcaccggccacgctgagtatgctggcactggttgggggctctggggacccctccatgcaggtgcgcccgtccacgcctagcactaggtcatgggggcagccgcaggtgaagctgcctgccgtattaaaacaatggtgcgagcagagggtgatgctggtcctacattcatccacgtctagttaccgaaaaaaggaaggggctgagagagggggcgggggcaagcacctgggtaggtggggaggacaagctgactcacccacatgacagtgcttccctccccagccgggggcgcactcgcactggtcaggcctaacgcagacgcctccgttcaggcaaggcttggcgcagatggctgaggacagaggaagtggggttcagactcaaaccgacgacccagctccccagctccgtggggcgcgcctcccgcaaggcccggaagacccagcctcaccttcacaggtgagcgcccccgggtgccgcttcttccagccctggcagcacactgcatgggtctgctgaacctcccgcctcacctcccgccacataacgcggtacatggtcctggaacacagcgcccggctcaggaccctgagtacgggtcctagttggggttcttggggtcccatctccccatccctcacctgtaagtgctgcagatgcgcctcccagcgcacaaggtcaggtagggcttgtacactggttggctgtaggactcgttgtagtggagcgggaccaccagtgtctgcttggagcagactccctgactgcgtccatgccagaggatgaggtgggagagattgagtaggccaggccctggggagccaggagtcccacttccctcaagaggctactgaggccccccgctctccctccagatgacagcctctcacccccattctaaacttacagttatgttttgcctcctgtgaagccccacccccagcagaaggctcctgagaagagctcaccccgggccctaccccctctgttgtcacctctctctgagggatccacccttggccccctcgcctggtatcagtagcaggaggaaggagaatccgcctaagagagtgcacagctcagccctggaccccatgattcgctttgacgctggaccctacaggctgcaggcaagaaaaggttaatggatgcccgtcccctctcctattaatttctccagcactagtccctccaagggcactctgcaggtaccctctaagggagtcaggacattcacttttacatactagccaccaggattgcctacacctgtgtgtacaacccaacactatcctgtccttagcatatcatgatcctttcagcatcataaaagctcacaccccagcacactccctccacctcccctctaacctacttacttctaatcccctctgcacaacctggagggacacacagtcaaccctccccttatgaccctcctgtctttttttgggtttttttttgtttttgtttttgagaaggagtttcgctcttactacccaggctggaatgcaatggcatgttcttgcctcaccgcacgacctccgccccccaggttcaagtgattctcctgcctcagcctcccaaatagctgggattacaggcatgcgccaccacgcctggctaattttgttttgttttgttttgtagggtgtgagggtatatagctagggttttttttttttggttttttttttgttgttgttttttgagacggagtctcgctgtcaccctggctggagtgcagtggtgcgatctcggcttgctgcaagctccgcctcccgggttcatgccattctcctgcctcagcctcccgagtagctgggactacaggcgcctgccaccacgcccggctaattttgttttgtatttttagtagagacggggtttctccatgttggtcaggctggtctcgaactcccgacttcaggtgatccgcctgccttggcctcccaaagtgctgggattacaggtgtgagccaccatgcctggccaaccctcctgtctttaacatgccctcttataacttcataccttcaaaaccctagctggttgggcgcggtggctcacacctgtaatcccagcactttgggaggctgaggtgggtggatcatgaggtcaggagttcgagaccagcctggccaagatggtgaaacccatctctactaaaaaatacaaaaaattagccaggcgcagtggtggacgcctgtaatcccagctactcgggaagctgaggcaggagaatcccttgaaccctggaggcagaggttgcagtgaaccaagatcatgccactgcactctagcctgggcgacagagcaagactccgtctcaaaaaaacaaacaaaacaaacaaacaaaaaaaacccctagctatataccttcacaccgtacacacaaaccaagcacctggaaactccacacctttcacacactgctactcccctcacatacccacaccgtcacataacgccctaaatgcacatcccttgctccaacaaaacaccccgcaactcatgcccaccctaaggctctgagtaaaccccactctttccccatttgaaattctctccccacttgccttcctctctctctccattcccacctggcttctttctcctgggaggcttcaagcagaccagcctcagcagaagcagctcagactggtgggtgggcctggcaggctaagaaggagaggaggggctgggccagagagtcctcccattcctgccccctcccacaagcctcctccttagctccagcagggtcagctcagtagggtcaagtcccactaccctcatccccaccccagcaaagggctccctagaagtatctttccaaccctctgaggcccctatttctggactccccagatcagaagctatgagctctgtaacaccaccagtacccccttgaacccaaaacagactaggggagagttagggggcagggagagaaccagctgcagggaacaaagcagttcaggttatgggagaaaaagcaagatcagctgaggaaagctagaagggcaagtcgtcacaaaggggcaggggggcagcccagggcaccaaggggaaaactgcccccctctcttcatgacatttgttagggcttagggggaacagaattgagtcagccaccaccccccatgccagaacagacagggccctattgtctcagccaaaattccttctttcaaggaagaggaggctcattgtccagccctacacccagctctggcccacaaagctcaaaagcggcacaacgaatgcccaccctgaccctctgccccctcgtctagcctgggggtggcaggcgcattccacccatgaggctgaggcccaaaccactggagccctgagcttaaccccccagtcttggggactgggagaggaagagaattgtcttcagcaggaaagaacccgcagagaaccaggaacccacaaagaatgggcattgagagagagcggaaacaccaagggggtccccaccctagaccaggcatctgggcacccaggcctcaggctccgcccccaccctccttggggagccaggtcccctccacctggaaatgagccaagtcacactgaggaaatggaactttatttccataaatacagggataacacctattcaaaggtagttaaaagagggcctggggcctcaaagaaactaggctctcccaggggggtactccaacactgatcatagggactgggggatccccaaacctgagatgggcctcataggccacagatattccccaacactgacacttcaagaacggaactgtccccataggggagcctcagaaccccactctcatgggtagtccctcttaggagttgggagggctgatgtcaggggactttagagaaaaaagggaacatggggaggagagaagctaaaaatgtcctgagtggcctggaaggagacccctgtggtgggcagggggtgggttctccacccatacagccagatacggaggagcagcagcagcaaaagcagccacaagttaaaaacatggtttctcacttcccaacttcggccttgagagaaagggacagcacggagcaatcccccaaatgagaggacatgaggtaggggaggcctggaattgtcattcatggaggagcagaggaagggggttctgggaggccaagtctctactaaaaccccgtctctactaaaaatgggggataatatgggagcaatgaggtggtcacaggcacaccaaagcctgacatctgctttccaaggccaccacttggtctctggaccgaggagttcctggggacccctgaatatatcctcaggagagccaaggttcaatgcaggtctcataaagggtacggttggagtgccaggctgtgtgggagataccggccattggacacctcactatggccccccgggccaatagagtcttcaacccaaaagaatcccgcagataaaccttcaaggtggtcgaaggggcgtggaagcatggaagagagacacaaggagagacaaagtgagttactgctgggatcctggacctcctccccacagggtgaacccttcagctcaggagtcacagagagggctctggaataaggtgggacagcggctagaaggggaagtaatcccagggggctcaccagttgctcctccatctccaggacggtctcatttgcatcatagaaaccaaagaagctacaaagagatttggggggaggttatcagaagagctggagaaaatctggccgggcgcagtggcacacgcctgtaattgcagcactttgggaggccaaggagggcaaatcacctgaggccaggagttcaagaccagcctgaccaaaatggtgaaaccccatctctactaaaaatacaaaaattagctgggcatggtggcagatgcctgcaagcccagctacccaagaggctgaggcaggataattacttgaacccgggaggtggaggttgcattgagtcgagatcgcaccactgcacttcagcctgggtgacagagcgggaccccatctcaaaaaggaaaggaaaggaaaaaggaaagaaaaaagaaaaggaaaaaagaaaggaagaaatcaaggtgggctaaggtcccaaaggaacccaaggcctactggggagacaggtagcagggaggacactcaaaactaccttactggatataatgtacttcatgaggtgatacactgaagatacgacctcacttctgtagaaaccccatcaaaaatgcattactggccgggcgaggtggctcacacctgtaatcccagcactttgggaggccaaggccggcggatcacctgaggtcgggagttcaagaccagcctggccaacgtggtgaaaccccatctctactaaaaatacaaaattagctgggcgtggtggctcaagcctgtaatcccagcactttgggaggccgaggagggtggatcatctgaggtcaggaattcgagaccagcctggccaacacggagaaaccctgtctctactaaaaatacaaaattagctgggcgtggtgggcgcctgtaatcccagctactcaggaggcagaggcaggagaattgcttgattctgggacgcaaaggttgcagtgagccgggatggcgccactgcactccagcctggcgacagagtgagactttgtctcaaaaaaaaaaaaaaaagaggccaggtgtggtggctcatgcctgtaatcccagcactttgggagaccaaggagggtggatcacctgaggtcaggagttcaagaccagcctggccaacatggagaaaccccgtctctactaaaaatacaaaattagttgggcatggtggtgggcgcctataatcccagctactcaggaggctaagacaggagaatcacttgaacctggcaggcggaggttgcagtgggccgagatttgccattgcactccagcctgggcaacaagagtgaaactccaactcaaacaaacaaacaaacaaaaagatactaaagagacgtaacaagatcatgcaactcaagatcctgatttggatcttccactgtatatttttttctgtaaggacagttggaaaaatttgaataatctgtgagcgcatattcaggaaaatttgaatctatgtttatatttaaatataacattaacgtatataaataaatgtatatatatttagagaaaaaagatattaatgtaaacatgacaaaatgttaacatttgcgaaatctaggtgaggagtataaatgactgctttttgctattttggtaacttttttttttttttttgagacagggtcttactctgtcacccaggcaggagtgcaatggtgagatctcggctcactgcagccttggcctcctaggctcaagcaattctcgtacctcagcctcccaagtagctgggactacaagggcacaccaccacgcccagctaatttttgtattttaggtaaagacagggttttgccatgttgcccaggctggtctcaaacccctgggctcatgcctcggcctcccaaagtgctaggattacaggcgcaaacttttcttaagtatgaaattatttcaaaatagaaaggtcttaaaatcctttttttcttttttttttgagacagagccttgctctgtcacccaggctggagtgcagtggcaccctgtcggctcattgcaacctccgcctcctggtttcaagttctcctgcctcagcctcctgagtagctggaactacaggcgtgcgccaccaggcccactaatttttgtatttttagtagagatggggtttctcaatgttagccagctgttctcgaactcctgacctcaggtgatccacccgcctcggcttcccaaagtgctgggattataggagtgagccaccgcacccagccagatggagttaaaatcttttaattaaaaaatattggccaggcaaggccgggtgcgtgggctcacacctataatcctagcactttgggaggccgaggcgggtggatcacgaggtcaggagatcgaaaccatcctggctaacacagtgaaaccccgtctctactaaaaatacaaaaaaattagccgggcgtggtggcgggtgcctgtagtcccagcgactcaggaggctgaggcaggagaatggcgtgaacctgggaggcagagcttgcagtgagccgagatcacgccactgcactccagcctgggcgaccgagcgaagactccaactcaaaaaatatatatctatctatatatagagagagatatatattggccaggcgcagtggctcacgcctgtaatcccaacactttgggaggccgaagcaggcggatcacaaggtcaggagatcgagaccatcctggctaacacagtgaaaccccgtctctaccagaaatactaaaaattagccaggcatggtggtgggcacctgtagtcccagccacttgggaggtgaggcaggagaatggcttgaacccaggaggcggaggttgcagtgagccgagattgtgctattacactctagcctgggcgacaagaacaaaactctgtctcaaaaaaaaaaaaaaggaagaaacagtgacttggaacattaaaaatgttatataaccatgagctatcactgtcattcatagggttgtggtagatgtgaaatgacatgatgtacataaaactcatcacttactattatattattacaatattttaagagatgtcctgccttcactgaaaactgtccagtgccttcccatctcactcagaatttaaaaaaaaaaatcaaaagcctggttaccgggactgtcgggaaatagggatgaggatatatatatatatatatatattttttttttttttttttttgagatggagtttcgctcttgttgcccaggctggagtgcaatggcgcaatctcagctcactgcaacctctgcctcccaggttcaagcgattctcctgcctcagcctcccaagtagctgggattacatgcatgcatcaccacacccagctagttttgtatttttagtacagacagggtttctccatgttggtcgggctagtctcgaactcccgacctcaggtgatccactgcctcggcctcccaaagtgctgggattacaggcgtgagccaccacacccagtctattttttaatgggtatacggtttcagtttggggaaaaagaagttctggagatggatggtgctgatgggtgatggttttacaatgatgtgagtatacttaatgccacaaaactgtacatttttaaatggttaaaatggcaattttatgttatgtatattttatcacaaaaaaaagaaaaaaaaatatcaagggccttaccttgacctgctaaggtttgacatgcctggtcccctgctaccacttttagctcctctcctgtcctctccccagctccttgtgcactagccatgctggcctccttattgctcacacgtgcttcagggcctctgcaggtgccagaccttctccctggggggttcttccacccagagcacaactccctccttcacttccttcagtctctaattgaatggtgacttttccaggaggacttcttcggccactattgaaactaggccccggacatcctctaatcctttcccctgccttattacctgacatatatatttgtatgtatgtatcagctatcttacaaactagaatataagctacataacattagggacttctcttttatttaccactgcatccctagggcccagaacaagcctgcgcccataatgttgaataaatatttgttgagcaattcaagtagctcaggtgacattacagatcacacatggtgacctataacacaggcaagcacatagtaccatggagccatggatttttttctaaggaataggatggaggggacaaagctggaggctgttataatagtccaggtaagtaaagaggtggtaggaaatgtgataaaatggtataaaactacacacacacattgaaccaatgtgaatttcctggttttgatactgtgctataattacataggatgcaaccactgggggaagctgggtgaagggcctcgctatactatctttgcaatttcctatgaatctataagaatttcaaaattaaaagtttttataaagtgggggagggggtgatagggatggagaggagaagagtcagcaggacttagtgactggcttgatacaaggggttgggatatgactcccaggttttggtcttgggtgacatgatgaatggggggaggagcactaactgaacagtggaaggagcaggccagtttaggcatgagataaagaccaactggggttgggggatgtctttagccaatcttcaggccacaaaatcccttattacctggactgccagggagtaataacaccatcatcagggcccccaatcagcaccaggtggcccacacgcagaaagttcttccgccatactgtaggatgggaagaagagaggctgagtcagccacaggggtcaggccaggttggagagggagacatagggagtcaaagaagcagaaaaagcaacacaggtaggagcctgaattctcacctgtggcattgggatggtctctttccccattgatcagggccaggaagctgctggcattgaggtacaagtcatcgtggtggggatctgggtacaaacagcagttagaaaaagaagcagaaaagggaggcaagactggtggtgaaaagcccaataaggaagctgcagcaatagtcaaggtggatagtaataaaatagtagtgataatgtaggccaggtgcggtggctcacacctgtaatcccagcactttgggaggtagaggcaggtggatcacttgaagtcgggagtttgagaccagcctggctaacatggcgaaaccctgtctctactaaaaatacaaaagttagccaggcgtggtggtgcatgcctgtaatcccagttactcggggcgctggaatcacttgaacccaggaggtggaggttacagtgagccgagactgcaccactgcactccatcctgggagacacagtgagactccatctcaaaataataatagtagtgataacaaccgtaaacatagtaacaagtacttttttttttttagatgaaatctcactccgtcacccaggctgaagtgcagtggcaggatctccgctcactgcaacatctgcctcccgggttcaagcaattctcctgactcagcatcctgagtagctgggattacaagcgtgtgcccacattcagctaaattttttttgtatttttagtagagatggggtttcaccatgttggccaggctggtctcgaacccgacctcaggtgatgcgcccacctccccctgccaagatattgggattacaggtgtgagccaccacacctggcaatagcaagtacttctatctagtatctactatatgagccaggtactattcaaagtacattgcattcatttatttatttaatccttacaaccacctggtgaagtacatgctataatattttacagataaggaaaactgagtaacagaatggttaagtaacttgcccaaaggcacccaatagggtcaagattcaaacccaagtattctggccccatggtctggtctagaggttggcaaactgtgaccaaaggaccaaatccagcctgctacttgtttttgtaaatgaagttttactggaacacaggcacattcattcacatatggtacatggctgctttcacactacaacagcagaattgaggagttgtgaaacagactatatgtcctacaaagtcaaaaatatttactctctggccctttatagacaaggtttgctgactcccacatcagactaaaccttctaaggcaataaggtgacacacttaaaacattctgggccaggtgcaatggttcacacctgtaatcccagcactttgggaggccgaggcgagtggatcacctgaggtcaggagttcgagaccagcctggccaacatggcgaaactccatctctacttaaaatacaaaacttagccgggcatgatggcgcctgcctgtaatcccagctactagggggactgaggcaggaggatcacttgaacctgggaggcggaggttgcagtgagccgagatggtgcactgcactccagcctgggcaacagaacaagactccgtctcaaaaaaaaaaaaaattctgaacagagcctgttcaaataactcaataaatgtaagttatctttattgtcatcactgctattggttgtagcagaggtggaagcaactgacctgatccatggaagccccagttcagcatccccactcaccatgccagtagttgcagatggagaattcctggccccaggggctatagcagatccgatagaggttagaccgcatggaggtggggaacagccacttcaagtagtccgtgtctggcaagcgaatggcaatgctaagtgaccataaacctctgttcccccaaaactcagggcattctatggagtctagtgcccactcacctccatactgtcccatctgtggagaggagagggagatgaaagaatccacgttgtgatcatccatgacagaaagcagagcccggcacacaaggccccctgtaagcagaacaccacattgggcaggcacttaaggacagcaaagccagcagcaccccccacccccaccacacacacacacacagagacacacacagacatacactgtacacaaaggagactgaggcttacagaaggcaggcacaccctgtgccaaaaggtcacacatcatataagtgactgagcccgaattagatgctgggcctcctgcctctagttctaggatgtttttacctgccccattagcccttatgtccaagaaccatgggtaacaggaagcaaaagggcagcagtgtagggagcctccctcccattcaagacagagatgagacccaggtgctgagggaagtcagaaaggaagggctcaggtaccagggttgtgcctggagcaatgtggttcagaaaaagggacgctaggaagtgtccctcagataaggatcaagcctcagatagggcttaggagttaggggcaggggagtcgcctaccctgcgagtagcagatgagatgcaccccttgaggggcctttgccatgatggggaccacagcctctcggaacccttgcacctgttcccacaggggtcgcaagctctctctcccatcgaagagatcgagcactgtcaccacagtcccggggtgtgtctgtgggaagggggcaatgcagccaccggggataggctaagaagctcccacacgccaccccctggcccgcgtccacaggtctattgtaccctgctagaaccagggatcccgtcccccaactctcccccacgccagcaccagctccctgaggaactgggcaggcccagaggggtggctttcagttccccgctctccctcccctgccacagtagacgcctctaacgccctgcacccaggtgtcccctgccagacctcattgatgtattccagcaggtggcggaagctgtacgagctgtcgaagagcccatgcaccacgatgaccggcttgtaggacgcgcggtggggcgcgggggctgcaagcagcagcagcggcaggaaaggcaacagaagcaggacccacgccgcggggagccgctgcccccagagccccagcatgctcccgcctgagaaaggggtgataagggcatgtgagggagatggcaacaccctcctccctcggaacagacgcccggcaatcaagccacctcctctcgctcccacaccaggtccgtgtcacaaaatagcctacttttaacttactccagccctctccctacaaacacacccccccaccacgttgacgcaccaacgcgcacccgaagtcccgcctccaactcagcgttcgggggacttgttctctaggtccaggatcttcctaatgcatcgcctcagccatgaacaacgcggagttctttaatacccgtgagcagcagcccaggccccttgaagagtgcagactcccacctggcctgggtccgtaggcctcgctccacccgctgtttacttatcccaagtctggaacccacggtggcggggggaagggtgaggaaagagaacgcaggggaatgacggatgggagggggaagggcgggctgcttggggtcgcgcaaatccgtcacgtccggggctttctctggcaaccgcgcgagcgttccccgcaacacagacccaggacaggaggggcaatggaatattccattgcgccctaggtgctggggaggaaacaggcggagcgatccatttaggccagtggggagaggaaaaagcagcaaacatattctgggaatggaaagaaggcctctccaggcttcgttgcccccagcgacccgaaagtccgatttccccgccttgattctccccacttcccaatacaggcgtctggctccgcagcagaacacgaagtttgcattccccaaggggcggccagggggcggaccagggaaaggtagtcctctgcattttgccgtgtgctgggtgagtggcagggtggcctggagggctgatgccagcccgggcgtgcccctcaacacccaccccaccccaccctccagtccgccccaggtcagcgacttacaactcttcattctgaagtgcgtgtagtgcccttgtctccagagacgcagagagtcctcgaggccccttgagctaagtgcagcctggcccagtttctcctgccctactctactcccctccctataagcgacccaccctcaaggggcggagggcgcgtagggatgcgctgactcatgcccgcgtaatttcgaccagtctttcaacctgaacgacccccagaatctggctgtctgagttatctgtgggtggctccctaccgaaacccccaggcgccccacctctccgcctgtgacccctaaccgacaccctagtgcctcagggcttttacttgctagggcttttacttagcatttaaagacgtttctctagagataaggatttctcagcatgtctgagcccctctctctgtttacaaggtcattgcttggtctaaatttgtctcaatcaaaacatttttgcgctcagaatggtgtagagtgacgatgaggtggcggtaaggggttgagcgctcacgcgaacgcctaagtgaccagaacgactggtgtgaagccgtgatctgactctgtggagcctgggactggtttcagcgagagcctctgtactgctctgtagtctctgctaggacatggacgaaaagggacgcagccgggagagcgactgccccaggtgggggctggggggacgtaagggaagaataatgattatctggctgtgtttttgtttaaaaaaaaaaaaaaactggtgtaaatctccatagacttcctatcctcgctcccttcacccacccacgcgctcccaagatgcaataagcaaataaaaagactaataacgctgtactgcaggtcgactcaggagctggagatgcgtcttggtgggaggtggtgggtgggagtaggggggtttagggaatggatctgaacattgaccagcccagagactctaagcagcctcaaaagcaaagggaaagtgggggaacaagcacacattaccaacagagctgccagaaatgagcagttaagtcataccccctaccccctccaaaagagcttcagctccttagtcctggacgaagaaggtatgtatgcacaccgcccaaactctctctcccttttccctccaaggcccagctccccctgatttacagacctgggcctccctctttactgctaggttggtaggttcaccaaaccctgggaacttttcagaccatcgcagttctgaactctgcacaattctctctcacacacaagtatttatctcttctaaagaggaggaaactggggccaaggatttgggagaagaccctggcaccttgcagggagctaagagggggagacgacctgcctctggaggcacctgggttattaactccactgagaacctgttcacttcctcccacaatacaatcactgagtcttggtgggggagactccagagagttctccttccttcctttccttagtcccacccgcctcgcctggtctagcctccgtgtttccatgacaactccaaaggagcccaaactgggggcttgaatgccggggtaagaggaggagagaggtggtccgagagcagagagagaccgagtgggaaacatctgaagcgctccccctccctcgcctcggtccctttaagctccccccctccccgctctccctccgcccgccccccccgccccccccccccgccgctgccttcatctctccatctctgcgctgctgccgctgcgccatccagcacccagactccagcaccggccgaggacccccactccggctgcagggaccctgtcccagcgagaccgcaggcatgtcatccgaaaagtcaggtaaaaacaataacaaaacctcccaccccctccactgtctccagactctccgtcccccttgccccaaccccctcccttacccctcctcagctgtggttctatttcattccccttctctccagctctcaacactcccccagtccccctcctctttctgtctccccctttctcttcctttcctctttccagtggcagcctctgccccttgccaacaacatggtcaggggggtaggttgagagggtgaaggaggtacagccaggttttgcagggatggcatcattgggagtgacagatggacaatcactggctggcatggagacatcctgtgaggaaatatggagacatgaccagatgggggttgtcaagggagcaaaatccagagggctcttcttaatctgccctaaaagaggtcccgagattctcacagaggctggggcactcctccccccactgaaggaacagcagagtggaacacatgtcatcccacatgtgtttatacaactgttgaattgagcacatattaacacagggttgcatgtctacgcatacgcacacacaggactagctcggataggccagcccaaaggcagctatagcaaaggagaggggattaggtctgcaggtgagagctgggtgcatggtgatgaaaaagacagaaaagaagcagaccagagttgtgacctcaaaactagattggaaggaagaaggaggggggcagatggcctagatacagcccctctcttgcccctcaaattagagatggtttctcacccgtctctctctatgtgtctctcccattatctttctccatccctgaccggctgtgtttccccttaccccctcctcaactcatcactgtgtcatctttcctcttatactctcctccactcacctcccccaggactcccagactcagtccctcacacttctccgccgccctacaatgcccctcagcctccagccgaacccccagccccaccgccacaggcagccccttcctcacaccatcaccaccaccaccactaccatcagtctggcaccgccaccctcccgcgcttaggggcagggggcctggcctcttccgcggccaccgctcagcgcggtccctcctcctctgccacgctgccgaggcccccccaccacgcccctcccggccctgctgccggggcacccccacccggctgcgctaccttgccccgcatgccacccgacccttacctgcaggagactcgcttcgagggcccacttcccccgccgccgcccgctgccgccgccccgcccccgccggcgccagcccagactgcccaggcccctggcttcgtggtgcccacgcacgcggggactgtgggcacgctgccgctggggggctacgtagcgcccggataccccctgcagctgcagccttgcactgcttacgtgccggtctacccggtgggcacggtgagtgccgggcagacagggacatgggaaagagggggacgcgatacaggacttgaaattggggatacgctgggggctggtaggatagaggaacaagggcagggaacaggtagtgttcccgggacaagccctagaaagaagggagcctgagacaggaaggactagggagagacacgggagtaggagtctactggtgcccagagtcagggcctgggagggggatcggagcctagaggttcagaggaggtctgaaagtaggaaaccgcctggcgggggacggggggaatggaagctgggaaccaagagggatgtgggagaagcctgggactaagggggtaggggaggcctggtaggtgtctggagggaagaaagaaggtctgacctgaggccaggacagccccagtgggaccataccttgcgggagagaatgtagaaagcccaagaatatggtggttaatgaagcaaggaagggaggagaggggcttaggtggaatttatgggtgtcctggaagggtaatgggtgctttattttgagaagccataggtaaaaattgtgcttttaaagccactctgccagccgcccaacgctggtaggctgggagagggtcagagtgatgcccctgccccccaaatttccttccacagccatatgcaggcgggaccccggggggaacaggagtgacctccactctccccccgccgccccagggcccagggctggccctactggagccgaggcgcccgccacacgactacatgcccatcgcggtgctgaccaccatctgttgcttctggcctactggcatcattgccatcttcaaggccgtgcaggtagggggcaggggcatactcggtttgggggcggggacagggagttctgggcgttctggggaccatcttagagaaaggctgaggcgttcgaacgaggccgcagctctttgacctccttcccccacccctcctccgtaggtgcgcacggccttggcccgcggagacatggtgtcggccgagatcgcttcacgcgaggcccggaacttctccttcatctccctggccgtgggcatcgcggccatggtgctctgtaccatcctcaccgtagtcatcatcatcgccgcgcagcaccacgagaactactgggatccctaaaaacgcccctggtccggccccactctgcgcccctcgatctcccaggctctttctgcagtcataccgcggacccaatgggcgccctgcacacccgtttctggggccgtcagacttggatacatcgtaaactccgcctccacggaacgtctcgccttgcgagcaagctcggaatccagttcctcaggaacccctccaaaacccacacccccagggacgccgctttccgggatcccggccaaacgccggaccctcagtcgctccaggccccctcaccctcaaagtgtagcgcccccaaccgagcaacctcggtttggtccctaaaaccccgcctcctctataagcaccgccccagctctgacaaaaccccgcctccaggtcggcaggctccgccttcttttcttctccgcggggtgattcagtccagtgattgggtttgtggctccaggcctcgcccacagacggacagacccctccctttcttccggcaaaaggaccgagccctggggtagtaaggcccccacactcctgttttttgcaagtacatttttgtccctcctccacccaggtatctgcctattttcttgctaatcccagaacctttccttttgctttttttaaggacatttgggaagttcctggtgtaggacccttctccctgggataagaaacctgcctgtaaacgctctgtaaatactcccttccacccatcccagcccctgggcagccgggcagaagggaatccaggctatggacctcccaagtccccgctccccgctcccctcggcggccccgccttgttctgatctgtgtgtgagtgtgtgtgaacttctgaaagacaatattaaagagacttagttgatttatcgcccgcaattccaaagactgcggccccgcaaagaccctccccacttttgattccgcctttcacttcccttcatctcctcttccaaggaaaaaaaaagaaaacccgacagagactaacgtgagggacacagattcccagatcgccagagagacacgtgaatatgggggacggaggggagctccctgggaatccaccaaggaagaccttggggtccattctcagtgaggctttattttcttagtgaggctttatttccccagtaccccttttccattccctactatccccagaactccaggaagacaagagaacagagagggcagaccatggtgaagaagctggtcaaggatagagtgatgggggccaagaagagatgccagctgcccatagctgttcctgactgtgggctggagggtggcagataacttggattagagccccacatgctggactgtagggggtataggaaaggcaaagagagcagattgctgtgggagcccagggaggaggtcaatggcctctcaagtctccctgggactagttgccctctcctatcctgaggtcaaccaataggcctcttttctgaggggagtggtgattaggggatgctgccagcagtgggcttgggtctttggttgtacacccacaggacagggtcctaacctaatttatgcatttatgcaacatgcagactccatgctggatgctggtgagacatccacccagacagcaggtgtgacccctgacctcatggagcttacaatctagaagggaagccatgcactgagataggaaatgtgataggagatgtgggaggagggtggggtgaggtgtgaatatcatgggttcgcccttggatgtttcgcatttaatgtgcctaccttaccaaacttcttgaaaaacagaattcacggctgggcacggtggctaacacctgtaattccagcactttgggaggccaaggcaggcggatcacttgaggtcaggagttcgggaccagcctggccaacatggtgaaaccccatctgtactaaaaataataaattagccgggcatggtgacgggcacctgcagtcccagctacttggaaggctgaggcaggagaatcgcttgaacttgggaggcggaggttgcagtgagccaagatcaagtcattgcactccagcctgggcaacaagagcgaaactccatctcaaaaaaaaaggggcaggggggtgcggaatattgctatcagagatatgtctgtatctgtctttttttcatacccactatttcttgacttattggaatatgcatccacaccctattctcctgaaacctccctctcaaatggcaaccaattacccagatcccaaatcaatggcattttcacagtattctgcctctctaagccctcccatgtttgtcccttgaccctgaattccccacatacccaggttcaagaacgtattacctcccttcccccgacacacacacagacctctaaccattccgcctctgccttccctccttgctttttctcctcccttcccctaagtgtccatctctgattttttttccttctctgagactttcctttgaaaagctcattcactcaactcagctaatcaaatgcttttccaacctgtattttacatgcagacgttttttccagtgcctgaagatcatagccacatggaagatgcttgctggtcctctaaaatcaacacattccaaaacaaactgatgaaatgccacagaaaacctgcttccctgtctctgttaatagaccattttcccaatcactcttccttatctagaaatttgccgcctcctccctctccctcctgccttatttttggtgtgctctcaagcctagtcagttctgccaccacaatgtcttttgaatctgtaatttttccccagcccttgctggaaaaattacctcattaggattattgcatcagctttcccaacaggtctccctacttcctacttctccctacctcaagtctccctccacactattgtcagatcagcctccctaaacacactttcataactccactgctcaaaagcccttcaaggttccctattgcctactcaattatttacaaaattttaatctggcctttaacaccttccataatttaaaatcatccagcttctctgttcattctaatttctaaccatactgaattactcatcattcccacctccaggtatttgcccagctgttcccaaatcttagacctccttcccaaatctctgcctattataaaccaaattgtttgcagcttgtcacaaatttcagaggctttagaccacatctaggctcttgctcatgatgttctccccctcttgacatctgcctctctacttggtcaaattttatttacaatatctttcaaagtccggatcaattcatccctcactgtagcaaaaaggtgtctctctttcctctgggttagattaaagcagtgggtttccaaacagagcttcaggcattccttggagcaacggttcttaccccaggttacacattagaatccactggggagcactgaaaaatctgaaagcccatgtcgcatcctaaaacaattaaatcagaatctctgggctcagtgccagtggctcacacctgtaatctcagcactctgggaagtcgaggcaggaggatcgtttaagcccaggagttcgagactagcctgggcaatatggtgagaccccatctctacaagaaagtttaaaaactagcctaggccagatcgagaccatcctggctaacatggtgaaaccgcgtctctactaaaaatacaaaaaaattagctgggtgtggtggtaggtgcctgtagtcccagctactcaggaggctgaggcaggagaacggcatgaacccgggaggtggagcttgcagtgagccgagatcgtgccatgcactccagcctgggcaacagagcgagactccgtctcaaaaaaaaaaaaaaaaaaaaaattagcctaggccgagcgcggtggctcacacatataatctcagcactttgggaggccgaggtgggtggatcacctgaggtcaggcgttcaagaccagcctggccaacgtggtgaaaccccgtctccactaaaactgcaaaaatcagccgggtatggtggcacatgcctgtaatcccagctactcaggaggctgaggcagaagaatcgcttgaacctaggaggcggaggttgcagtgagcccagattgcaccactgcactccagcctgggtggcagagaggcactcagtctcaaaaagaaaaagaaaaaaaaaatttagccgagccccatggctcacctgtagtcttagctacttgggagggtgagacgggaggattgcttgggcctgaggggcagaggcttcagtgatcagaacacggtgctccagcctgggcaacagagtgagaccctatctcaaaacaaacaaaaaagaatctctgggggtggaactctggcatcagtatttaagacataaccaggtgattccaaagggcagccaaggttgggaatcacaggtttacagacactttaaggaccacccagggagaatggaaaggccaaaaaatgacttcaacccgggcaattttctttaggagaaaagtatctagatctaagattcatgttatctgcatattttctcatctcttcccacctgatatcttgacatacacagtttaccttgtgagctacttgaaggcaagagtcaaatctggcttatctctgtttttcagatcctcatcagataaaacctcctctaccaatctttgaactcaattgaattgaaaggaatcaggcaaagggagagatgaataaaaaatgacttagctttcttttgcttttccttaggaatgtttgtttcttaatctcagatctcttaacctcacccagactcctccctcatgaggaaataaaatgttacaatgtgtggccgggcgcggtggctcactcctgtaatcctagcactttgggaggccgagatgggcggatcacgaggtcaggagatcaggaccatcctggctaacacggtgaaaccccatttccactaaaaatacaaaaaattagctgggtgtggtggcaggcacctgtagtcccagccacttgggaggctgaggcaagagaatggtgtgaatcccggaggcagagcttgcagtgagccgagattgtgccactgcactccagcctgggcaacagggcgagactccgtctcaaaaaaaaaaaaagttacaatgtgatcctcttcctatctgactcacctccctctgcaggtgatacccttggctgtggcacctctactgacagagactccatcctctaggagaggctctgccctcccataacatctgtatgggtgctctcatacagatgggggaaaaccatgattagattctgggtcatcattccccctctacaatggaagattcagcacctgatcactctacttccaccgctcatttcattttcttctttttattatttatttatttatttttgagatggagttttgctcttctcgcccaggctggagtgcagtggcgcaatctcgtctcactgcaacctccgcctcctgagttcaatagattctcctgcctcagccttagtaggtgtgattacaggcatctgccaccacgcccagctaatttttgtatttttactagagacagggtttcaccatgttggccaggctggtcttgaactcctgatcttaggttatctgcctacctcggcctcccaaagtgctgggattacacacgtgagccaccgagcccagcctctttttcttttttcttttttttctgaggcagggtctcgctctgtcacccaggctggagtgcagcagcaggatcatagctcactgagcttcgatctcccggtctcaagtgatcctcccagctaattttttttatttttattttattttttttttttgagatggagtctggctctgtcgcccagactggagtgcagtggcacaatctcagctcactgcaaccttgcctcctggattcaagcaattctctgcctcagcctctgagtagctaggattacaggcgcctgccaccacgcccggataaattttgggtttttttttttttttttttgagacagagtctcaccctgtcgcctagcctggagtgcagtggtgcgatctcggctcactgcaagctctgcctcccgggttcatgccattctcccgcctcccacctcagcctcccaagtagctgggactacaggcacccgccaccatgcccagttaattttgtttttgtatttttagtagagacggggtttcaccgtgttagccaggatggtctcaatctcctgacctggtgatccgccctcctcaccctcccaaagtgctaggattacaggcttgaggcaccgcccctggcctgtttttttgttcgtttgtttttgttttttttggacggaattttgctcttgttgcccaagctggagtgcaatggtgccatctcagctcactgcaacctctgcctcccaggttcaagcgattctcctgcctcagcctcctgagtagctcggattaccggcgtgtgccaccatgcccggctaattttttgtatttttagtagaaatggggtttcaccatattggtcaggctggtctcaaactcttgacctcgtgatccacccgcctcggccttccaaagtgctgggattacaggcataaaccactgcgcctggcctctggcctttgatatttaatagagatgaggtcacactgtgttgcccaggacagtctcgaactcctgaattcacacaatctgcctgcctcagcctcccaaagtgccgggattataggcatgagctacagtgcctggccccgttttattatttttgttttcaatgttcatgcagattctctagcaccctgcccttctcttgcagtgatttatttctccctgcttccctctcgccctatgtcataccttcaacttggttgccaccaatacctactgcccttctaaaatctcatcctcagtcttttcatgttgctccccagtacccctatcccaaaaattcttcaaccccatctgggcctcccatccactaacttacttttcattgtttgatctcaattcttcactttcctcattacccagtttagattccaaggttcaacacggtaatcgcctctcagccctcaccctgtactcctggccccccttcctctggcacattttatccctggtcaaatcccactctgcctgctccacacctgcattcaacagctggggagaaacacacagtcatactgactggtcttgcttcctgcgggccctcagtgtggcatgccagctcgcctttccctactcagttcacattccccaaatctgagaccacaacttcacaagatgatgacttttcttcctatttcagtgagaaaacagaaactttcagaagggaacttcctcatgttcccaccccaaattcaccagtctacctgcaactctaccgcagagaagctgacatgcacccacctgccacctcatctgtaccccgggatcctgttccctctcacctgctcagagatgttattcctgaaattatcccctatctctctctctctcacttaatcagtttacccctctgtactgcaacactcccatcattatgcaaacatgctataaaattatacttcatctctgaaaagaaagaaaaaaactgtttcgctactcacctaggtagtaaaagcacaacattcagagaatggtgcttaccctttggcagaaaagcaatctggaaagggaaattcagggagccttaactatactggggaagattttacctcttgtttttgctttcttttttttttttttttttttttgagatggagtctccctctgtcacccaggctggagtgcaatggcacgatctcagctcactgcaacctccgcctcccgggttcaagcgattctcctgcctcagcctcccaagtagctgggattataggcacgcaccaccacacctggctaatgttttagtagagacaggatttcaccatgttagccaggctggtctccaactcctgacctcaggtgatccgcccacctcagcctcccaaagtgctgggattacaggtgtgagccaccttgccctgatgggaagattttacttcataagctgcctgatgttcacaaaattattctttgtaatacatatatatttatgcatataaattataattttatatgtataaaataatgcatttatttttaaatttaaaaactcttccctgacccagctcactccctcagtgttccacttctctctccacttaacaaaacttctcactgcctctactttctcacctctcattcactcttgaatttctctcaatcaggctctcatccccaccactttacttaaaccacatgtcagagtcacaaatgacctccaagtttctaaacccaatggtcaagggtcagtttgtggcaggccaattctccctgacagtcacacagacaggcctgcatagcaccccagttacacagacagatttccacagcattgccttaacattgagcaaatagttaaacctaggggaattggtgtacagacatcaaagctagaaatgaaacacatggtgagtaagagccttgcatgggcttctcccttgctggagcaagtcaaaataacagagacagccttacattcctagtgccaggactcgtctcgggtcgacgatatctgagacaagtcaaggtaacagaggcagctgtttgaatagattcactggacaatctaaggcagctctccgcaccaagctgtaaaggagataagatagaaataatcactctggtaccacagtaaacaggccttgaaggtactggggccctcacagcttaatcagacttagcaagaatttttttgcctctgaccctctagttgaaacaaaattagttactgatagactttggtgaatgccatactgcatgtaggcatataacctaaacctgtataaacactaagaaaatagtaacactggccgggtgtggtggctcacacctgtaattctagcactttgggaggccgaggtgggtggatc

SEQ ID NO: 5285 - DNA, 375 bp, Homo sapiens; identical to SEQ ID NO: 3418
  misc_feature (1)..(375): n=a,t,g or c

SEQ ID NO: 5286 - DNA, 198 bp, Homo sapiens; identical to SEQ ID NO: 3517

SEQ ID NO: 5287 - DNA, 297 bp, Homo sapiens
atagcaaataataaatttattaggtgcctacaagtacaaaatactgaaagccgctgcaggggattataaagatgtgtaagagacaagccctgccctcaaagagcttacaatctaggcaattagtcacacaaataagttgtgatggcgctctaagtgacctcagcagagttcttgaaaatgttcatatccttcaaattcttctcttgtcaaattaaacagtgggaaagagaacttttgtggcattcactggtgaccctgactctgcttgcaagcatctttctgctgttgcacgttgtc

SEQ ID NO: 5288 - DNA, 367 bp, Homo sapiens
ttttgttcaataaatgtttattgctttttcaattattctatttacaaacaacatggaatttcttggcctcatgatacaaagcgatactaaactgtagtctagcagtgtaggcaacatcatgggaaccagaaaatggccaggccttttgcactagccaacactttccagttgaaaatactattttacacatatagaacacttataaaatgcacttgcatgtaaacactgtaaaatcctgccatttaaaattctacactcaaaaagctctaagtacatcaaaaaatagaagaaatttctaattgataccaataaggcattttaaaactacaaacagctttctttattcaatttcaaagctaatactctg

SEQ ID NO: 5289 - DNA, 343 bp, Homo sapiens
  misc_feature (1)..(343): n=a,t,g or c
gttttcccttnactttatttatcttcataagtcacaaaatgtgagtgcagagataaatgtctgtgtgcatgtgccctgagcnacagggtggcataactcggcacactcataatgacacagccgttcacccagccacagatagtgacagggcacacatggcgacacccacatgtacggagataaatctcccccaccatgacatgggtagacagaaaacacgccgcagtatactctagtatgtttacacaaacagggagacaggcccgtgcaatgcatgtcaccaccacccacantcagnggttgacatctgcttgggggttcttcngacaaaggccaccccacc

SEQ ID NO: 5290 - DNA, 402 bp, Homo sapiens
  misc_feature (1)..(402): n=a,t,g or c
ttttggcttttaaaggaaacaatacggtttgctagaaaaacctcaaaaaataatgattatatacaaaatggttatctgaatgtggattctgtactgcagcagaagcaacccagctccggaactctatttgcgcttcctcagtatcaggtacatcatgccgctgatgaaggtgcaggcgaaggcacccacgccagggatntaggagtagccgtagctgccttctctggtcacgggatagaatttcgcgtttttgtcgtgaatgtcttcacgcctgtctgtataaatgggaggccgcaatcatgacacacagacatgacattaggctgggatgatggaaggttangggcaaancctcttcttccctgctttcaaggcnggaaagaaccttggancaccgaagga

SEQ ID NO: 5291 - DNA, 517 bp, Homo sapiens
ttttttttctggttttaaactttattttccatgtacagtttcagattatacaaaacatagaaaatggactattttaaaggtacattaagtagaaagtttctaactaccctaaagtcacaaaccaagattcaaaatgaacctctaggccttgccctaacatttccccaacaccacaaaattgtccaacttgctctattgtaagtaacctttaaactattagcgagtttagtaacatcccgcgaggcagattttaaactacgatacagtttctatctaggccactgtgtttagtgtgtttacaaacaggcttggagttctaggtttcttcatcatcagtgaacacagagcgtcctagagcgccacgctgttcatgaggggtgtccacaaaagcacgcaaactatagcagagtgtgtgggagtgaataggtctccgatgttcctgtattcaggtatatatatatacacattcacacagaccaacaagtcaagcattctccaaactcatttgaacagagac

SEQ ID NO: 5292 - DNA, 195 bp, Homo sapiens; identical to SEQ ID NO: 2878
  misc_feature (1)..(195): n=a,t,g or c

SEQ ID NO: 5293 - DNA, 308 bp, Homo sapiens; identical to SEQ ID NO: 3439
  misc_feature (1)..(308): n=a,t,g or c

SEQ ID NO: 5294 - DNA, 504 bp, Homo sapiens; identical to SEQ ID NO: 492
  misc_feature (1)..(504): n=a,t,g or c

SEQ ID NO: 5295 - DNA, 690 bp, Homo sapiens
cagcacatcccgctctgggctttaaacgtgacccctcgcctcgactcgccctgccctgtgaaaatgttggtgcttcttgctttcatcatcgccttccacatcacctctgcagccttgctgttcattgccaccgtcgacaatgcctggtgggtaggagatgagttttttgcagatgtctggagaatatgtaccaacaacacgaattgcacagtcatcaatgacagctttcaagagtactccacgctgcaggcggtccaggccaccatgatcctctccaccattctctgctgcatcgccttcttcatcttcgtgctccagctcttccgcctgaagcagggagagaggtttgtcctaacctccatcatccagctaatgtcatgtctgtgtgtcatgattgcggcctccatttatacagacaggcgtgaagacattcacgacaaaaacgcgaaattctatcccgtgaccagagaaggcagctacggctactcctacatcctggcgtgggtggccttcgcctgcaccttcatcagcggcatgatgtacctgatactgaggaagcgcaaatagagttccggagctgggttgcttctgctgcagtacagaatccacattcagataaccattttgtatataatcattattttttgaggtttttctagcaaaccgtattgtttcctttaaaagccaaaa

SEQ ID NO: 5296 - DNA, 379 bp, Homo sapiens; identical to SEQ ID NO: 3403

SEQ ID NO: 5297 - DNA, 305 bp, Homo sapiens; identical to SEQ ID NO: 3499

SEQ ID NO: 5298 - DNA, 551 bp, Homo sapiens
caacaacaaaattagtagacatccaagaagcacatattaggaccaaagatagcatcaactgtatttgaaggaactgtagtttgcgcattttatgacatttttataaagtactgtaattctttcattgaggggctatgtgatggagacagactaactcattttgttatttgcattaaaattattttgggtctctgttcaaatgagtttggagaatgcttgacttgttggtctgtgtgaatgtgtatatatatatacctgaatacaggaacatcggagacctattcactcccacacactctgctatagtttgcgtgcttttgtggacacccctcatgaacaggctggcgctctaggacgctctgtgttcactgatgatgaagaaacctagaactccaagcctgtttgtaaacacactaaacacagtggcctagatagaaactgtatcgtagtttaaaatctgcctcgcgggatgttactaaactcgctaatagtttaaaggttacttacaatagagcaagttggacaattttgtggtgttggggaaatgttag

SEQ ID NO: 5299 - DNA, 395 bp, Homo sapiens; identical to SEQ ID NO: 2874
  misc_feature (1)..(395): n=a,t,g or c

SEQ ID NO: 5300 - DNA, 357 bp, Homo sapiens; identical to SEQ ID NO: 3412

SEQ ID NO: 5301 - DNA, 1410 bp, Homo sapiens
cggaattagggagatagttggtattaggattaggattgttgtgaagtatagtacggatgctacttgtgcaatgatggtaaaagggtagcttactggttgtcctccgattcaggttagaatgaggaggtctgcggcttggagctcctggggcctaacaaaaagaaacctgccatgctgctcttcctcctctctgcactggtcctactcacacagcccctgggctacctggaagcagaaatgaagacctactcccacagaacaacgcccagtgcttgcaccctggtcatgtgtagctcagtggagagtggcctgcctggtcgcgatggacgggatgggagagagggccctcggggcgagaagggggacccaggtttgccaggagctgcagggcaagcagggatgcctggacaagctggcccagttgggcccaaaggggacaatggctctgttggagaacctggaccaaagggagacactgggccaagtggacctccaggacctcccggtgtgcctggtccagctggaagagaaggtcccctggggaagcaggggaacataggacctcagggcaagccaggcccaaaaggagaagctgggcccaaaggagaagtaggtgccccaggcatgcagggctcggcaggggcaagaggcctcgcaggccctaagggagagcgaggtgtccctggtgagcgtggagtccctggaaacgcaggggcagcagggtctgctggagccatgggtccccagggaagtccaggtgccaggggacccccgggattgaagggggacaaaggcattcctggagacaaaggagcaaagggagaaagtgggcttccagatgttgcttctctgaggcagcaggttgaggccttacagggacaagtacagcacctccaggctgctttctctcagtataagaaagttgagctcttcccaaatggccaaagtgtcggggagaagattttcaagacagcaggctttgtaaaaccatttacggaggcacagctgctgtgcacacaggctggtggacagttggcctctccacgctctgccgctgagaatgccgccttgcaacagctggtcgtagctaagaacgaggctgctttcctgagcatgactgattccaagacagagggcaagttcacctaccccacaggagagtccctggtctattccaactgggccccaggggagcccaacgatgatggcgggtcagaggactgtgtggagatcttcaccaatggcaagtggaatgacagggcttgtggagaaaagcgtcttgtggtctgcgagttctgagccaactggggtgggtggggcagtgcttggcccaggagtttggccagaagtcaaggcttagaccctcatgctgccaatatcctaataaaaaggtgaccatcaaaaaaaaaa

SEQ ID NO: 5302 - DNA, 2535 bp, Homo sapiens
gcagaccgggcgtcgggtgagcccagaagtgagagcagttggctgtgccccagtgctgtgtgacccagaggcgccgctcaccctctctgagctggtggacatcatagcgggtgcagcccaaaactgtcttctgaggaagaggtgctctcctgggcccccactgtccccaggcctcagatgctgcatattgctggcccagctcctgaggctctttggacctccaggaatcggtgtctctatcaggaacccttaaccctgacccggactcccagctgggacccggggtgtcggagtggcaagagcgctgtcaggcctggtgaagggtgtgagctgtccaacggggcagggaggaggcagggcctgttctgcagttggacagacagagccctctagctgctttctggaagactgaagggcagcaaggcaagtgaggtgctgccgtcatccaggctggacagttcagtgatttgcctgaggccccacagcaggagaacgagaaggctgcctgatcagagagtccctgaagaagattctgtggctacaggcttcagcagagtgtgagggagaccccggttatttcctcagctatttccaccaaatcctcctgtctttcgtggccaacaccccaggcaaggcttggggcccccgtctgctgctggacgcagagccatgaagaagaagttagtggtgctgggcctgctggccgtggtcctggtgctggtcattgtcggcctctgtctctggctgccctcagcctccaaggaacctgacaaccatgtgtacaccagggctgccgtggccgcggatgccaagcagtgctcgaagattgggagggatgcactgcgggacggtggctctgcggtggatgcagccattgcagccctgttgtgtgtggggctcatgaatgcccacagcatgggcatcgggggtggcctcttcctcaccatctacaacagcaccacacgaaaagctgaggtcatcaacgcccgcgaggtggcccccaggctggcctttgccaccatgttcaacagctcggagcagtcccagaagggggggctgtcggtggcggtgcctggggagatccgaggctatgagctggcacaccagcggcatgggcggctgccctgggctcgcctcttccagcccagcatccagctggcccgccagggcttccccgtgggcaagggcttggcggcagccctggaaaacaagcggaccgtcatcgagcagcagcctgtcttgtgtgaggtgttctgccgggatagaaaggtgcttcgggagggggagagactgaccctgccgcagctggctgacacctacgagacgctggccatcgagggtgcccaggccttctacaacggcagcctcacggcccagattgtgaaggacatccaggcggccgggggcattgtgacagctgaggacctgaacaactaccgtgctgagctgatcgagcacccgctgaacatcagcctgggagacgcggtgctgtacatgcccagtgcgccgctcagcgggcccgtgctggccctcatcctcaacatcctcaaagggtacaacttctcccgggagagcgtggagagccccgagcagaagggcctgacgtaccaccgcatcgtagaggctttccggtttgcctacgccaagaggaccctgcttggggaccccaagtttgtggatgtgactgaggtggtccgcaacatgacctccgagttcttcgctgcccagctccgggcccagatctctgacgacaccactcacccgatctcctactacaagcccgagttctacacgccggatgacgggggcactgctcacctgtctgtcgtcgcagaggacggcagtgctgtgtccgccaccagcaccatcaacctctactttggctccaaggtccgctccccggtcagcgggatcctgttcaataatgaaatggacgacttcagctctcccagcatcaccaacgagtttggggtacccccctcacctgccaatttcatccagccagggaagcagccgctctcgtccatgtgcccgacgatcatggtgggccaggacggccaggtccggatggtggtgggagctgctgggggcacacagatcaccacggccactgcactggccatcatctacaacctctggttcggctatgacgtgaagcgggccgtggaggagccccggctgcacaaccagcttctgcccaacgtcacgacagtggagagaaacattgaccaggcagtgactgcagccctggagacccggcaccatcacacccagatcgcgtccaccttcatcgctgtggtgcaagccatcgtccgcacggctggtggctgggcagctgcctcggactccaggaaaggcggggagcctgccggctactgagtgctccaggaggacaaggctgacaagcaatccagggacaagatactcaccaggaccaggaaggggactctgggggaccggcttcccctgtgagcagcagagcagcacaataaatgaggccactgtgccaggctcaggtggcctcctggcctttcc

SEQ ID NO: 5303 - DNA, 73308 bp, Homo sapiens
gaattctaatctccctctcaaccctacagtcacccatttggtatattaaagatgtgttgtctactgtctagtatccctcaagtagtgtcaggaattagtcatttaaatagtctgcaagccaggagtggtggctcatgtctgtaattccagcactggagaggtagaagtgggaggactgcttgagctcaagagtttgatattatcctggacaacatagcaagacctcgtctctacttaaaaaaaaaaaaattagccaggcatgtgatgtacacctgtagtcccagctactcaggaggccgaaatgggaggatcccttgagctcaggaggtcaaggctgcagtgagacatgatcttgccactgcactccagcctggacagcagagtgaaaccttgcctcacgaaacagaatacaaaaacaaacaaacaaaaaactgctccgcaatgcgcttccttgatgctctaccacataggtctgggtactttgtacacattatctcattgctgttcgtaattgttagattaattttgtaatattgatattattcctagaaagctgaggcctcaagatgataacttttattttctggacttgtaatagctttctcttgtattcaccatgttgtaactttcttagagtagtaacaatataaagttattgtgagtttttgcaaacacagcaaacacaacgacccatatagacattgatgtgaaattgtctattgtcaatttatgggaaaacaagtatgtactttttctactaagccattgaaacaggaataacagaacaagattgaaagaatacattttccgaaattacttgagtattatacaaagacaagcacgtggacctgggaggagggttattgtccatgactggtgtgtggagacaaatgcaggtttataatagatgggatggcatctagcgcaatgactttgccatcacttttagagagctcttggggaccccagtacacaagaggggacgcagggtatatgtagacatctcattctttttcttagtgtgagaataagaatagccatgacctgagtttatagacaatgagcccttttctctctcccactcagcagctatgagatggcttgccctgcctctctactaggctgactcactccaaggcccagcaatgggcagggctctgtcagggctttgatagcactatctgcagagccagggccgagaaggggtggactccagagactctccctcccattcccgagcagggtttgcttatttatgcatttaaatgatatatttattttaaaagaaataacaggagactgcccagccctggctgtgacatggaaactatgtagaatattttgggttccatttttttttccttctttcagttagaggaaaaggggctcactgcacatacactagacagaaagtcaggagctttgaatccaagcctgatcatttccatgtcatactgagaaagtccccacccttctctgagcctcagtttctctttttataagtaggagtctggagtaaatgatttccaatggctctcatttcaatacaaaatttccgtttattaaatgcatgagcttctgttactccaagactgagaaggaaattgaacctgagactcattgactggcaagatgtccccagaggctctcattcagcaataaaattctcaccttcacccaggcccactgagtgtcagatttgcatgcactagttcacgtgtgtaaaaaggaggatgcttctttcctttgtattctcacatacctttaggaaagaacttagcacccttcccacacagccatcccaataactcatttcagtgactcaacccttgactttataaaagtcttgggcagtatagagcagagattaagagtacagatgctggagccagaccacctgagtgattagtgactcagtttctcttagtaattgtatgactcagtttcttcatctgtaaaatggagggttttttaattagtttgtttttgagaaagggtctcactctgtcacccaaatgggagtgtagtggcaaaatctcggctcactgcaacttgcacttcccaggctcaagcggtcctcccacctcaacatcctgagtagctggaaccacaggtacacaccaccatacctcgctaattttttgtatttttggtagagatggggtttcacatgttacacaggatggtctcagactccggagctcaagcaatctgcccacctcagccttccaaagtgctgggattataagcatgattacaggagttttaacaggctcataagattgttctgcagcccgagtgagttaatacatgcaaagagtttaaagcagtgacttataaatgctaactactctagaaatgtttgctagtattttttgtttaactgcaatcattcttgctgcaggtgaaaactagtgttctgtactttatgcccattcatctttaactgtaataataaaaataactgacatttattgaaggctatcagagactgtaattagtgctttgcataattaatcatatttaatactcttggattctttcaggtagatactattattatccccattttactacagttaaaaaaactacctctcaacttgctcaagcatacactctcacacacacaaacataaactactagcaaatagtagaattgagatttggtcctaattatgtctttgctcactatccaataaatatttattgacatgtacttcttggcagtctgtatgctggatgctggggatacaaagatgtttaaatttaagctccagtctctgcttccaaaggcctcccaggccaagttatccattcagaaagcattttttactctttgcattccactgtttttcctaagtgactaaaaaattacactttattcgtctgtgtcctgctctgggatgatagtctgactttcctaacctgagcctaacatccctgacatcaggaaagactacaccatgtggagaaggggtggtggttttgattgctgctgtcttcagttagatggttaactttgtgaagttgaaaactgtggctctctggttgactgttagagttctggcacttgtcactatgcctattatttaacaaatgcatgaatgcttcagaatatgggaatattatcttctggaatagggaatcaagttatattatgtaacccaggattagaagattcttctgtgtgtaagaatttcataaacattaagctgtctagcaaaagcaagggcttggaaaatctgtgagctcctcaccatatagaaagcttttaacccatcattgaataaatccctataggggatttctaccctgagcaaaaggctggtcttgattaattcccaaactcatatagctctgagaaagtctatgctgttaacgttttcttgtctgctaccccatcatatgcacaacaataaatgcaggcctaggcatgactgaaggctctctcataattcttggttgcatgaatcagattatcaacagaaatgttgagacaaactatggggaagcagggtatgaaagagctctgaatgaaatggaaaccgcaatgcttcctgcccattcagggctccagcatgtagaaatctggggctttgtgaagactggcttaaaatcagaagccccattggataagagtagggaagaacctagagcctacgctgagcaggtttccttcatgtgacagggagcctcctgccccgaacttccagggatcctctcttaagtgtttcctgctggaatctcctcacttctatctggaaatggtttctccacagtccagcccctggctagttgaaagagttacccatgcagaggccctcctagcatccagagactagtgcttagattcctactttcagcgttggacaacctggatccacttgcccagtgttcttccttagttcctaccttcgaccttgatcctcctttatcttcctgaaccctgctgagatgatctatgtggggagaatggcttctttgagaaacatcttcttcgttagtggcctgcccctcattcccactttaatatccagaatcactataagaagaatataataagaggaataactcttattataggtaagggaaaattaagaggcatacgtgatgggatgagtaagagaggagagggaaggattaatggatgataaaatctactactatttgttgagaccttttatagtctaatcaattttgctattgttttccatcctcacgctaactccataaaaaaacactattattatctttattttgccatgacaagactgagctcagaagagtcaagcatttgcctaaggtcggacatgtcagaggcagtgccagacctatgtgagactctgcagctactgctcatgggccctgtgctgcactgatgaggaggatcagatggatggggcaatgaagcaaaggaatcattctgtggataaaggagacagccatgaagaagtctatgactgtaaatttgggagcaggagtctctaaggacttggatttcaaggaattttgactcagcaaacacaagaccctcacggtgactttgcgagctggtgtgccagatgtgtctatcagaggttccagggagggtggggtggggtcagggctggccaccagctatcagggcccagatgggttataggctggcaggctcagataggtggttaggtcaggttggtggtgctgggtggagtccatgactcccaggagccaggagagatagaccatgagtagagggcagacatgggaaaggtgggggaggcacagcatagcagcatttttcattctactactacatgggactgctcccctatacccccagctaggggcaagtgccttgactcctatgttttcaggatcatcatctataaagtaagagtaataattgtgtctatctcatagggttattatgaggatcaaaggagatgcacactctctggaccagtggcctaacagttcaggacagagctatgggcttcctatgtatgggtcagtggtctcaatgtagcaggcaagttccagaagatagcatcaaccactgttagagatatactgccagtctcagagcctgatgttaatttagcaatgggctgggaccctcctccagtagaaccttctaaccagctgctgcagtcaaagtcgaatgcagctggttagactttttttaatgaaagcttagctttcattaaagattaagctcctaagcagggcacagatgaaattgtctaacagcaactttgccatctaaaaaaatctgacttcactggaaacatggaagcccaaggttctgaacatgagaaatttttaggaatctgcacaggagttgagagggaaacaagatggtgaagggactagaaaccacatgagagacacgaggaaatagtgtagatttaggctggaggtaaatgaaagagaagtgggaattaatacttactgaaatctttctatatgtcaggtgccattttatgatatttaataatctcattacatatggtaattctgtgagatatgtattattgaacatactataattaatactaatgataagtaacacctcttgagtacttagtatatgctagaatcaaatttaagtttatcatatgaggccgggcacggtggctcatatatgggattacatgcctgtaatcccagcactttgggaggccaaggcaattggatcacctgaggtcaggagttccagaccagcctggccaacatggtgaaaccccttctctactaaaaaatacaaaaaatcagccaggtgtggtggcacgcgtctataatcccagctactcaggaggctgaggcaggagaatcacttgaacccaggaggtggaggttgcagtgagctaagattgcaccactgcactccagcctaggcgacagagtgagactccatctcaaaaaaaaaaaaagaagtttattatatgaattaacttagttttactcacaccaatactcagaagtagattattacctcatttattgatgaggagcccaatgtacttgtagtgtagatcaacttattgaaagcacaagctaataagtagacaattagtaattagaagtcagatggtctgagctctcctactgtctacattacatgagctcttattaactggggactcgaaaatcaaagacatgaaataatttgtccaagcttacagaaccaccaagtagtaaggctaggatgtagacccagttctgctacctctgaagacagtgttttttccacagcaaaacacaaactcagatattgtggatgcgagaaattagaagtagatattcctgccctgtggcccttgcttcttacttttacttcttggcgattggaagttgtggtccaagccacagttgcagaccatacttcctcaaccataattgcatttcttcaggaaagtttgagggagaaaaaggtaaagaaaaatttagaaacaacttcagaataaagagattttctcttgggttacagagattgtcatatgacaaattataagcagacacttgagaaaactgaaggcccatgcctgcccaaattaccctttgaccccttggtcaagctgcaactttggttaaagggagtgtttatgtgttatagtgttcatttactcttctggtctaacccattggctccgtcttcatcctgcagtgacctcagtgcctcagaaacatacatatgtttgtctagtttaagtttgtgtgaaattctaactagcgtcaagaactgagggccctaaactatgctaggaatagtgctgtggtgctgtgataggtacacaagaaatgagaagaaactgcagattctctgcatctccctttgccgggtctgacaacaaagtttccccaaattttaccaatgcaagccatttctccatatgctaactactttaaaatcatttggggcttcacattgtctttctcatctgtaaaaagaatggaagaactcattcctacagaactccctatgtcttccctgatgggctagagttcctctttctcaaaaattagccattattgtatttccttctaagccaaagctcagaggtcttgtattgcccagtgacatgcacactggtcaaaagtaggctaagtagaagggtactttcacaggaacagagagcaaaagaggtgggtgaatgagagggtaagtgagaaaagacaaatgagaagttacaacatgatggcttgttgtctaaatatctcctagggaattattgtgagaggtctgaatagtgttgtaaaataagctgaatctgctgcctaacattaacagtcaagaaatacctccgaataactgtacctccaattattctttaaggtagcatgcaactgtaatagttgcatgtatatatttatcataatactgtaacagaaaacacttactgaatatatactgtgtccctagttctttacacaataaactaatctcatcctcataattctattagctaatacatattatcatcctatatttcagagacttcaagaagttaagcaacttgctcaagatcatctaagaagtaggtggtatttctgggctcatttggcccctcctaatctctcatggcaacatggctgcctaaagtgttgattgccttaattcatcagggatgggctcatactcactgcagaccttaactggcatcctcttttcttatgtgatctgcctgaccctagtagaacttatgaaatttctgatgagaaaggagagaggagaaaggcagagctgactgtgatgagtgatgaaggtgccttctcatctgggtaccagtggggcctctaagactaagtcactctgtctcactgtgtcttagccagttccttacagcttgccctgatgggagatagagaatgggtatcctccaacaaaaaaataaattttcatttctcaaggtccaacttatgttttcttaatttttaaaaaaatcttgaccattctccactctctaaaataatccacagtgagagaaacattcttttcccccatcccataaatacctctattaaatatggaaaatctgggcatggtgtctcacacctgtaatcccagcactttgggaggctgaggtgggtggactgcttggagctcaggagttcaagaccatcttggacaacatggtgataccctgcctctacaaaaagtacaaaaattagcctggcatggtggtgtgcacctgtaatcccagctattagggtggctgaggcaggagaattgcttgaacccgggaggcggaggttgcagtgagctgagatcgtgccactgcactccagcctgggggacagagcacattataattaactgttattttttacttggactcttgtggggaataagatacatgttttattcttatttatgattcaagcactgaaaatagtgtttagcatccagcaggtgcttcaaaaccatttgctgaatgattactatactttttacaagctcagctccctctatcccttccagcatcctcatctctgattaaataagcttcagtttttccttagttcctgttacatttctgtgtgtctccattagtgacctcccatagtccaagcatgagcagttctggccaggcccctgtcggggtcagtgccccacccccgccttctggttctgtgtaaccttctaagcaaaccttctggctcaagcacagcaatgctgagtcatgatgagtcatgctgaggcttagggtgtgtgcccagatgttctcagcctagagtgatgactcctatctgggtccccagcaggatgcttacagggcagatggcaaaaaaaaggagaagctgaccacctgactaaaactccacctcaaacggcatcataaagaaaatggatgcctgagacagaatgtgacatattctagaatatattatttcctgaatatatatatatatatatatacacatatacgtatatatatatatatatatatatttgttgttatcaattgccatagaatgattagttattgtgaatcaaatatttatcttgcaggtggcctctatacctagaagcggcagaatcaggctttattaatacatgtgtatagatttttaggatctatacacatgtattaatatgaaacaaggatatggaagaggaaggcatgaaaacaggaaaagaaaacaaaccttgtttgccattttaaggcacccctggacagctaggtggcaaaaggcctgtgctgttagaggacacatgctcacatacggggtcagatctgacttggggtgctactgggaagctctcatcttaaggatacatctcaggccagtcttggtgcattaggaagatgtaggcaactctgatcctgagaggaaagaaacattcctccaggagagctaaaagggttcacctgtgtgggtaactgtgaaggactacaagaggatgaaaaacaatgacagacagacataatgcttgtgggagaaaaaacaggaggtcaaggggatagagaaggcttccagaagaatggctttgaagctggcttctgtaggagttcacagtggcaaagatgtttcagaaatgtgacatgacttaaggaactatacaaaaaggaacaaatttaaggagaggcagataaattagttcaacagacatgcaaggaattttcagatgaatgttatgtctccactgagcttcttgaggttagcagctgtgagggttttgcaggcccaggacccattacaggacctcacgtatacttgacactgttttttgtattcatttgtgaatgaatgacctcttgtcagtctactcggtttcgctgtgaatgaatgatgtcttgtcagcctacttggtttcgctaagagcacagagagaagatttagtgatgctatgtaaaaacttcctttttggttcaagtgtatgtttgtgatagaaatgaagacaggctacatgatgcatatctaacataaacacaaacattaagaaaggaaatcaacctgaagagtatttatacagataacaaaatacagagagtgagttaaatgtgtaataactgtggcacaggctggaatatgagccatttaaatcacaaattaattagaaaaaaaacagtggggaaaaaattccatggatgggtctagaaagactagcattgttttaggttgagtggcagtgtttaaagggtgatatcagactaaacttgaaatatgtggctaaataactagaatactctttattttttcgtatcatgaatagcagatatagcttgatggccccatgcttggtttaacatccttgctgttcctgacatgaaatccttaatttttgacaaaggggctattcattttcattttatattgggcctagaaattatgtagatggtcctgaggaaaagtttatagcttgtctatttctctctctaacatagttgtcagcacaatgcctaggctataggaagtactcaaagcttgttaaattgaattctatccttcttattcaattctacacatggaggaaaaactcatcagggatggaggcacgcctctaaggaaggcaggtgtggctctgcagtgtgattgggtacttgcaggacgaagggtggggtgggagtggctaaccttccattcctagtgcagaggtcacagcctaaacatcaaattccttgaggtgcggtggctcactcctgtaatcacagcagtttgggacgccaaggtgggcagatcacttgaggtcaggagttggacaccagcccagccaacatagtgaaacctggtctctgcttaaaaatataaaaattagctggacgtggtgacgggagcctgtaatccaactacttgggaggctgaggcaggagaatcgcttgaaccggggaggtggagtttgcactgagcagagatcatgccattgcactccagcctccagagcgagactctgtctaaagaaaaacgaaaacaaacaaacaaacaaacaaacaaaacccatcaaattccctgaccgaacagaattctgtctgattgttctctgacttatctaccattttccctccttaaagaaactgtggaacttccttcagctagaggggcctggctcagaagcctctggtcagcatccaagaaatacttgatgtcactttggctaaaggtatgatgtgtagacaagctccagagatggtttctcatttccatatccacccacccagctttccaattttaaagccaattctgaggtagagactgtgatgaacaaacaccttgacaaaattcaacccaaagactcactttgcctagcttcaaaatccttactctgacatatactcacagccagaaattagcatgcactagagtgtgcatgagtgcaacacacacacacaccaattccatattctctgtcagaaaatcctgttggtttttcgtgaaaggatgttttcagaggctgaccccttgccttcacctccaatgctaccactctggtctaagtcactgtcaccaccacctaaattatagctgttgactcataacaatcttcctgcttctaccactgccccactacaatttcttcccaatatactatccaaattagtcttttcaaaatgtaagtcatatatggtcacctctttgttcaaagtcttctgatagtttcctatatcatttataataaaaccaaatccttacaattctctacaatagttgttcatgcatatattatgtttattacagatacgcatatatatagctctcatataaataaatatatatatttatgtgtatgtgtgtagagtgttttttcttacaactctatgatgtaggtattattagtgtcccaaattttataatttaggacttctatgatctcatcttttattctccccttcaccgaatctcatcctacattggccttattgatattccttgaaaattctaagcatcttacatctttagggtatttacatttgccattccctatgccctaaatatttaatcatagtttcatataaatgggttcctcatcatctatgggtactctctcaggtgttaactttatagtgaggactttcctgccatactacttaaagtagcgataccctttcaccctgtcctaatcacactctggccttcatttcagttttttttttttctccatagcacctaatctcattggtatataacatgtttcatttgcttatttaatgtcaagctctttccactatcaagtccatgaaaacaggaactttattcctctattctgtttttgtgctgtattcttagcaattttacaattttgaatgaaatgaatgagcagtcaaacacatatacaactataattaaaaggatgtatgctgacacatccactgctatgcacacacaaagaaatcagtggagtagagctggaagcgctaagcctgcatagagctagttagccctccgcaggcagagccttgatgggattactgagttctagaattggactcatttgttttgtaggctgagatttgctcttgaaaacttgttctgaccaaaataaaaggctcaaaagatgaatatcgaaaccagggtgttttttacactggaatttataactagagcactcatgtttatgtaagcaattaattgtttcatcagtcaggtaaaagtaaagaaaaactgtgccaaggcaggtagcctaatgcaatatgccactaaagtaaacattattccataggtgtcagatatggcttattcatccatcttcatgggaaggatggccttggcctggacatcagtgttatgtgaggttcaaaacacctctaggctataaggcaacagagctccttttttttttttctgtgctttcctggctgtccaaatctctaatgataagcatacttctattcaatgagaatattctgtaagattatagttaagaattgtgggagccattccgtctcttatagttaaatttgagcttcttttatgatcactgtttttttaatatgctttaagttctggggtacatgtgccatggtggtttgctgcacccatcaacccgtcatctacattaggtatttctcctaatgctatccttcccctagccccccacccccaacaggccccagtgtgtgatgttcccctccctgtgtccatggatcactggttttttttttttttttttttttttttttaaagtctcagttaaatttttggaatgtaatttattttcctggtatcctaggacctgcaagttatctggtcactttagccctcacgttttgatgataatcacatatttgtaaacacaacacacacacacacacacacacacatatatatatataaaacatatatatacataaacacacataacatatttatcgggcatttctgagcaactaactcatgcaggactctcaaacactaacctatagccttttctatgtatctacttgtgtagaaaccaagcgtggggactgagaaggcaatagcaggagcattctgactctcactgcctttggctaggtccctccctcatcacagctcagcatagtccgagctcttatctatatccacacacagtttctgacgctgcccagctatcaccatcccaagtctaaagaaaaaaataatgggtttgcccatctctgttgattagaaaacaaaacaaaataaaataagcccctaagctcccagaaaacatgactaaaccagcaagaagaagaaaatacaataggtatatgaggagactggtgacactagtgtctgaatgaggcttgagtacagaaaagaggctctagcagcatagtggtttagaggagatgtttctttccttcacagatgccttagcctcaataagcttgcggttgtggaagtttactttcagaacaaactcctgtggggctagaattattgatggctaaaagaagcccgggggagggaaaaatcattcagcatcctcacccttagtgacacaaaacagagggggcctggttttccatatttcctcatgatggatgatctcgttaatgaaggtggtctgacgagatcattgcttcttccatttaagccttgctcacttgccaatcctcagttttaaccttctccagagaaatacacattttttattcaggaaacatactatgttatagtttcaatactaaataatcaaagtactgaagatagcatgcataggcaagaaaaagtccttagctttatgttgctgttgtttcagaatttaaaaaagatcaccaagtcaaggacttctcagttctagcactagaggtggaatcttagcatataatcagaggtttttcaaaatttctagacatgagattcaaagccctgcacttaaaatagtctcatttgaattaactctttatataaattgaaagcacattctgaactacttcagagtattgttttatttctatgttcttagttcataaatacattaggcaatgcaatttaattaaaaaaacccaagaatttcttagaattttaatcatgaaaataaatgaaggcatctttacttactcaaggtcccaaaaggtcaaagaaaccaggaaagtaaagctatatttcagcggaaaatgggatatttatgagttttctaagttgacagactcaagttttaaccttcagtgcccatgatgtaggaaagtgtggcataactggctgattctggctttctactcctttttcccattaaagatccctcctgcttaattaacattcacaagtaactctggttgtactttaggcacagtggctcccgaggtcagtcacacaataggatgtctgtgctccaagttgccagagagagagattactcttgagaatgagcctcagccctggctcaaactcacctgcaaacttcgtgagagatgaggcagaggtacactacgaaagcaacagttagaagctaaatgatgagaacacatggactcatagagggaaacaacgcatactggggcctatcagagggtggagggtgagagaaggagaggatcaggaaaaatcactaatggatgctaagcgtaatacctgagtgatgagatcatctatacaacaaacccccttgacattcatttatctatgtaacaaacctgcacatcctgtacacgtacccctgaacttaaaataaaagttgaaaacaagaaagcaacagtttgaacacttgttatggtctattctctcattctttacaattacactagaaaatagccacaggctcctgcaaggcagccacagaatttatgacttgtgatatccaagtcattcctggataatgcaaaatctaacacaaaatctagtagaatcatttgcttacatctatttttgttctgagaatatagatttagatacataatggaagcagaataatttaaaatctggctaatttagaatcctaagcagctcttttcctatcagtggtttacaagccttgtttatatttttcctattttaaaaataaaaataaagtaagttatttgtggtaaagaatattcattaaagtatttatttcttagataataccatgaaaaacattcagtgaagtgaagggcctactttacccaacaagaatctaatttatataatttttcatactaatagcatctaagaacagtacaatatttgactcttcaggttaaacatatgtcataaattagccagaaagatttaagaaaatattggatgtttccttgtttaaattaggcatcttacagtttttagaatcctgcatagaacttaagaaattacaaatgctaaagcaaacccaaacaggcaggaattaatcttcatcgaatttgggtgtttctttctaaaagtcctttatacttaaatgtcttaagacatacatagattttattttactaattttaattatacagacaataaatgaatattcttactgattactttttctgactgtctaatctttctgatctatcctggatggccataacacttatctctctgaactttgggcttttaatataggaaagaaaagcaataatccatttttcatggtatctcatatgataaacaaataaaatgcttaaaaatgagcaggtgaagcaatttatcttgaaccaacaagcatcgaagcaataatgagactgcccgcagcctacctgacttctgagtcaggatttataagccttgttactgagacacaaacctgggcctttcaatgctataacctttcttgaagctcctccctaccacctttagccataaggaaacatggaatgggtcagatccctggatgcaagccaggtctggaaccataggcagtaaggagagaagaaaatgtgggctctgcaactggctccgagggagcaggagagaatcaaccccatactctgaatctaagagaagactggtgtccatactctgaatgggaagaatgatgggattacccatagggcttgttttagggagaaacctgttctccaaactcttggccttgagatacctggtccttattccttggactttggcaatgtctgaccctcacattcaagttctgaggaagggccactgccttcatactgtggatctgtagcaaattccccctgaaaacccagagctgtatcttaattgtttaaaaaaattatattatctcaaggactgttcttctctgagtagccaagctcagcttggttcaagctacaagcagctgagctgctttttgtctagtcattgttcttttatttcagtggatcaaatacgttctttccaaacctaggatcttgtcttcctaggctatatattttgtcccaggaagtcttaatctggggtccacagaacactagggggctggtgaagtttatagaaaaaaaatctgtatttttacttacatgtaactgaaatttagcattttcttctactttgaatgcaaaggacaaactagaatgacatcatcagtacctattgcatagttataaagagaaaccacagatattttcatactacaccataggtattgcagatctttttgtttttgtttttgtttgagatggagtttcgctcttattgcccaggctggagtgcagtggcatgatttcggctcactgcaacctccccttcctgcattcaagcaattctcctgccttggcctccagagtagctggggattacaggcacctgccaccatgccagtctaatttttgtatttttagtagagatggggtttcgccatgttggccaggctggtcttgaactcctgacctcagatgatctgcccgccttggcctcctgaagtgctgggattataggtgtgagccaccacgcctggcccattgcagatatttttaattcacatttatctgcatcactacttggatcttaaggtagctgtagacccaatcctagatctaatgctttcataaagaagcaaatataataaatactataccacaaatgtaatgtttgatgtctgataatgatatttcagtgtaattaaacttagcactcctatgtatattatttgatgcaataaaaacatattttttttagcacttacagtctgccaaactggcctgtgacacaaaaaaagtttaggaattcctggttttgtctgtgttagccaatggttagaatatatgctcagaaagataccattggttaatagctgaaagaaaatggagtagaaattcagtggcctggaataataacaatttgggcagtcattaagtcaggtgaagacttctggaatcatgggagaaaagcaagggagacattcttacttgccacaagtgtttttttttttttttttttatcacaaacataagaaaatataataaataacaaagtcaggttatagaagagagaaacgctcttagtaaacttggaatatggaatccccaaaggcacttgacttgggagacaggagccatactgctaagtgaaaaagacgaagaacctctagggcctgaacataggaaattgtaggaacagaaattcctagatctggtggggcaaggggagccataggagaaagaaatggtagaaatggatggagacggaggcagaggtgggcagatcatgaggtcaagagatcgagaccatcctggcaaacatggtgaaatcccgtctctactaaaaataaaaaaattagctgggcatggtggcatgcgcctgtagtcccagctgctcgggaggctgaggcaggagaatcgtttgaacccaggaggcgaaggttgcagtgagctgagatagtgccattgcactccagtctggcaacagagtgagactccgtctcaaaaaaaaaaaaaagaaagaaagaaaagaaaaagaaaaaagaaaaaataaatggatgtagaacaagccagaaggaggaactgggctggggcaatgagattatggtgatgtaagggacttttatagaattaacaatgctggaatttgtggaactctgcttctattattcccccaatcattacttctgtcacattgatagttaaataatttctgtgaatttattccttgattctaaaatatgaggataatgacaatggtattataagggcagattaagtgatatagcataagcaatattcttcaggcacatggatcgaattgaatacactgtaaatcccaacttccagtttcagctctaccaagtaaagagctagcaagtcatcaaaatggggacatacagaaaaaaaaaaggacactagaggaataatataccctgactcctagcctgattaatatatcgattcacttttttctctgtttgatgacaaattctggctttaaataattttaggattttaggcttctcagctcccttcccagtgagaagtataagcaggacagacaggcaagcaagaagagagccccaggcaatactcacaaagtagccagtgtcccctgtggtcatagagaaatgaaaagagagaggattccctggaagcactggatgtaatcttttctgtctgtcctctctagggaatcaccccaaggtactgtactttgggattaaggctttagtcccactgtggactacttgctattctgttcagtttctagaaggaactatgtacggtttttgtctccctagagaaactaaggtacagaagttttgtttacaatgcactccttaagagagctagaactgggtgagattctgttttaacagctttattttcttttccttggccctgtttttgtcaactgtcaccacctttaaggcaaatgttaaatgtgctttggctgaaactttttttcctattttgagatttgctcctttatatgaggctttcttggaaaaggagaatgggagagatggatatcattttggaagatgatgaagagggtaaaaaaggggacaaatggaaatttgtgttgcagatagatgaggagccaacaaaaaagagcctcaggatccagcacacattatcacaaacttagtgtccatccatcactgctgaccctctccggacctgactccacccctgaggacacaggtcagccttgaccaatgacttttaagtaccatggagaacagggggccagaacttcggcagtaaagaataaaaggccagacagagaggcagcagcacatatctgcttccgacacagctgcaatcactagcaagctctcaggcctggcatcatggtgcattttactgctgaggagaaggctgccgtcactagcctgtggagcaagatgaatgtggaagaggctggaggtgaagccttgggcaggtaagcattggttctcaatgcatgggaatgaagggtgaatattaccctagcaagttgattgggaaagtcctcaagattttttgcatctctaattttgtatctgatatggtgtcatttcatagactcctcgttgtttacccctggacccagagattttttgacagctttggaaacctgtcgtctccctctgccatcctgggcaaccccaaggtcaaggcccatggcaagaaggtgctgacttcctttggagatgctattaaaaacatggacaacctcaagcccgcctttgctaagctgagtgagctgcactgtgacaagctgcatgtggatcctgagaacttcaaggtgagttcaggtgctggtgatgtgattttttggctttatattttgacattaattgaagctcataatcttattggaaagaccaacaaagatctcagaaatcatgggtcgagcttgatgttagaacagcagacttctagtgagcataaccaaaacttacatgattcagaactagtgacagtaaaggactactaacagcctgaattggcttaacttttcaggaaatcttgccagaacttgatgtgtttatcccagagaattgtattatagaattgtagacttgtgaaagaagaatgaaatttggcttttggtagatgaaagtccatttcaaggaaatagaaatgccttattttatgtgggtcatgataattgaggtttagaagagatttttgcaaaaaaaataaaagatttgctcaaagaaaaataagacacattttctaaaatatgttaaatttcccatcagtattgtgaccaagtgaaggcttgtttccgaatttgttggggattttaaactcccgctgagaactcttgcagcactcacattctacatttacaaaaattagacaattgcttaaagaaaaacagggagagagggaacccaataatactggtaaaatggggaagggggtgagggtgtaggtaggtagaatgttgaatgtagggctcatagaataaaattgaacctaagctcatctgaattttttgggtgggcacaaaccttggaacagtttgaggtcagggttgtctaggaatgtaggtataaagccgtttttgtttgtttgtttgttttttcatcaagttgttttcggaaacttctactcaacatgcctgtgtgttattttgtcttttgcctaacagctcctgggtaacgtgatggtgattattctggctactcactttggcaaggagttcacccctgaagtgcaggctgcctggcagaagctggtgtctgctgtcgccattgccctggcccataagtaccactgagttctcttccagtttgcaggtcttcctgtgaccctgacaccctccttctgcacatggggactgggcttggccttgagagaaagccttctgtttaataaagtacattttcttcagtaatcaaaaattgcaattttatcttctccatcttttactcttgtgttaaaaggaaaaagtgttcatgggctgagggatggagagaaacataggaagaaccaagagcttccttaagaaatgtatgggggcttgtaaaattaatgtggatgttatgggagaattcccaagattcccaaggaggatgatatgatggagaaaaatctttatcggggtgggaaaatggttaattaagtggcagagactcctaggcagtttttactgcaccggggaaagaaggagctgttgtggtacctgagaaagcagatttgtggtacatgtcacttttcattaaaaacaaaaacaaaacaaaacaaaacttcatagatatccaagatataggctgagaattactattttaatttactcttatttacattttgaagtagctagcttgtcacatgttttatgaaattgatttggagataagatgagtgtgtatcaacaatagcctgctctttccatgaaggattccattatttcatgggttagctgaagctaagacacatgatatcattgtgcattatcttctgatacaatgtaacatgcactaaaataaagttagagttaggacctgagtgggaaagtttttggagagtgtgatgaagactttccgtgggagatagaatactaataaaggcttaaattctaaaaccagcaagctagggcttcgtgacttgcatgaaactggctctctggaagtagaagggagagtaagacatacgtagaggactaggaaagaccagatagtacagggcctggctacaaaaatacaagcttttactatgctattgcaatactaaacgataagcattaggatgttaagtgactcaggaaataagattttgggaaaaagtaatctgcttatgtgcacaaaatggattcaagtttgcagataaaataaaatatggatgatgattcaaggggacagatacaatggttcaaacccaagaggagcagtgagtctgtggaattttgaaggatggacaaaggtggggtgagaaagacatagtattcgacctgactgtgggagatgagaaggaagaaggaggtgataaatgactgaaagctcccagactggtgaagataacaggaggaaaccatgcacttgaccctggtgactctcatgtgtgaagggtagagggatattaacagatttactttttaggaagtgctagattggtcagggagttttgaccttcaggtcttgtgtctttcatatcaaggaacctttgcattttccaagttagagtgccatattttggcaaatataactttattagtaattttatagtgctctcacattgatcagactttttcctgtgaattacttttgaatttggctgtatatatccagaatatgggagagagacaaataattattgtagttgcaggctatcaacaatactggtctctctgagccttataacctttcaatatgccccataaacagagtaaacagggattattcatggcactaaatattttcacctaggtcagtcaacaaatggaggcaatgtgcattttttgatacatatttttatatatttatggggcatgtgatacttacatgcctagaacatgtgactgattaagtctagatatttaggatatccattactttgagcatttatcatttctatgtattgagaaaatttcaaatcctcatttctgaccattttgaaatatataataaatagtaattaactatagtcaccctactcaaatatcaacattataaactaactaatccttctttccacttttttaccaaccaacatctcttaaatcccctgccatacacatcacacatttttcagctctgataactatcattctactctcataccaccatgagaccacttttttagctccacagatgaataaaaacatgtgatatttgactttctgtatctggcttattttattatctatctctttggcataccaagagtttgtttttgttctgcttcagggctttcaattaacataatgacctctggttccatccatgttgctacaaatgacaagatttcattctttttcatggcaaaatagtactgtgcaaaaaatacaattttttaatccgttcatctgttgatagacacttaggttgatcccaaaccttaactattgtgaataggtgcttcaataaacatgagtgtaatgtgtccattggatatactgatttcctttcttttggataaataaccactagtgagattgctggattgtatgatagttctgtttttagtttattgagaaatcttcatactgttttccataatggttgtactattttacattcccaccaacagtgtgtaagaaagagttcccttttctccatatcctcacaaggatctgttattttttgtcttttttgttaatagcattttaactagagtaagtagatatctcattgtagttttgatttgcatttccctgatcattagtgatgttgagattttttcatatgtttgttggtcatttgtatatctttttctgagattgtctgttcatgtccttatcctacttttattgggattgttgttattttcttgataatcattgtgtcattttagagcctggatattattcttttgtcagatgtatagattgtgaagattttctcctctgtgggttgtctgtttattctgcagactcttccttttgccatgcaaaagctctttagtttaatttagtcccagatattttctttgtttttatgtgtttgcatttgtgttcttgtcatgaaatcctttcctaagccaatgtgtagaagggtttttccgatgttattttctagaattgttacagtttcaggcttagatttaagtccttgatccatcttaagttgatttttgtataaggtgagagatgaagatccagtttcattctcctacatgtagcttgccagctatcccgactcatttgttgaatagggtgccctttcccatttatgtttttgtttgctttgtcaaagatcagttcggatgtaagtatttgagtttatttctgggttctctattctgttccattggtccgatgtgcctatttgtacaccagcatcatgctgtgtttttggtgactatggccttattgtatagtttgaaatgaggtaatgtaatgccattcagatttgttcttttttttagacttgcttgtttattgggctcttttttggttccataagaattttaggattgttttttctagttctgtgaaggctaatggtggtatttatgggaattgcaatgcaatttgtaggttgcttctggcattatggccattttcacaatattgattctacccatctatgagaatggcatgtgtttccatttgtttgtgtcttatatgattactatcagccgtgttttgtagttttccttgtagatgtctttcacctccttggttaggtatatattcctaagtttttgttttgttttgttttgttttttgcagctattgtaaaaggggttgagttattgattttattctcatcttggtcattgctggtatgtaagaaagcaactcattggtgtacgttaattttgtatccagaaactttgctgaattattttatcagttctagggggttttggaggagtctttagagttttctacatacacaatcatatcatcagcaaacagtgacagtttgactttctctttaacaatttggatgtgctttacttgtttctcttgtctgattgctcttgctaggacttccagtaatatgttaaagagaagtggtgagagtgggtatccttgtctcattccagttttcagacagaatgcttttaactttttcccattcaatataatgttggctgtgtgtttaccatagctggcttttattacattgaggtatgtcctttgtaaaccgattttgctgagttttagtcataaagtgatgttgaattttgttgaatgcagtttctgtggctattgagataatcacatgatttttgtttccaattctctttatgttgtgtatcacacttattgacttgcgtatgttaaaccatccgtgcatccctcgcatgaaaccacttgatcatgggttttgatatgccgtgtgggatgctattagctatattttgtcaaggatgttggcatctatgttcatcagggatattgatctgtagtgttttttttttttggttatgttctttcccagttttggtattaaggtgatactggcttcatagaatgatttagggaggattctctctttctctatcttgtagaatactgtcaataggattggtatcaattcttctttgaatgtctggtagaattcgaacgtctcctttaggttttctagtttattcatgtaaaggtgttcatagtaaccttgaataatcttttgtatttctgtggtatcagtaatagtatctcctgttttgtttctaactgagtttatttgcacttctctcctcttttcttggttaatcttgctaatggtctatcagttttatttatcttttcaaagaaccagctttttatttcatttagcttttgtatttttttgcagttgttttaatttcatttagttctcctcttatcttagttattccctttcttttgctgggttttggttctgtttgtttttgtttctctagtttcttgtggtgtgaccttatattgtctgtcctctttcagactctttgacatcgacatttagggctgtgaactttccttttagcaccatctttgctgtatcctagaggttttgataggtgtgtcactattgtcggtcagttcaagtaattttgttgttcttattatactttaagttctgggatacatgtgcagaatgtgcaggtttgttacataggtatagatgtgccatggtggtttgctgctcccatcaacctgtcatctacattaggtatttcttttaatgttatccctctcctaaccccctcaccccccgacaggccctggtgtgtgatgttcccctccctgtgtccatgtgttctcattgttcaactcccacttatgagtgagaacgtgtggtgtttggtttctctgttcctgtgttagtttgctcagaatgatgtttccaccttcaccatgtccctgcaaagacatgaactcatcattttatggctgcatatattccatggtgtatatgtgccacattttctttatccattatatcgctgatggccatttgggttggttccaagtctttggtattgtgaatagtgccgcaataaacatacgtgtgcacatgtctttatagtagaatgatttctaattctttgggtatatacccagtaatgggattgctgggtcaaacagtatttctggttctagatccttgaggaattgccacactgtcttccacaatggttgaactaatttacacacccatcaacagtgtaaaatttttcctattcttccacatcctctccagcaccttttgtttcctgactttttaataattgccattctaactggcatgagatggtatctcattgtggttttgatttgcatttctctaatgaccagtgatgatgagcttcttttcatgtgtttcttggccacataaatgacttctttagagaagcatctgttcatatcctttgtccactttttgatggggtcgttaggttttttcttgtaaatttgttgaagttctttgtagattttggatgttagccctttgtcagatggatagattggcaaaaattttctcccattctgtaggttgcctgttcactctgatgatagtcttttgctgtgcagaagctctttagtttaattagatcccatatgtcaattttggcctttgttgtcattgcttttgatgtttagtcgtggaattttgcccatgcctatgtcctgaatggtattgcctaggttatcttctaggatttttatggttttaggttgcacatttaagtctttaatccaccttgagttaatttttgtataaggtgtaaggaaggggtacagtttcagttttatgcatattgctagccagtttttccagcaccatttattaaatagggaattctttctccattgcttttgtgatgtttgtcaaagatcagatggtcgtagatgtgtggcattatttctgaggcttctgttctgttccactggtctatatatctgttttggtaccagtaccatgctgtttttgttactgtagccttgtagtatagcttgaagtcaggtagcatcatgcctccagctttgttctttttgtttaggattgtcttggctatatgggctcttttttgattccatatgacatttaaagtagttttttctaattctttgaaaaaagtcagtggtagcttgatggggatagcattgaatctataaattactttgggcagtatggccattttaaagatattgattctttctatctatgagcatggaatgtttttccatttgtttgtgtcctctcttatttccttgagcagtgagtggtttgtagctctccttgaagaggttcttcacatcccttataagttgtatttctaggtattttattttattctctttgcagcaattgtgaatgggagttcacccatgatttggctctctgcttgtctattattggtgtataggaatgcttgtgatttttgcacactgattttgtatcttgagactttgctgaagctgtttatcagcttaagattttgggctgagatgacagggtcttctaaatatacaatcatgtcatctgcaaacagagacaatttgacttcctctcttcctatttgaatatgctttatttctttctcttgcctgattgtcctggcgagaacttccaatactatgttgagtaagagtggcgagagggcatccttgtcttgtgccggttttcaaagcaaatgatttttaaatttccgtcttgatttcattgttgacccaatgatcattcaggagcaggttatttaatttccctgtatttgcatggttttgaaggttccttttgtagttgatttccaattttattctactgtggtctgagagagtgcttgatataatttcaatttttaaaaatttattgaggcttgttttgtggcatatcatatggcctatcttggagaaagttccatgtgctgatgaatagaatgtgtattctgcagttgttgggtagaatgtcctgtaaatatctgttaagtccatttgttctttaaatccattgtttctttgtagactgtcttgatgacctgcctagtgcagtcagtggagtattgaagtcccccactattattatgttgctgtctagtagtaattgttttataaatttgggatctccagtattagatgcatatatattaagaattgtaatattctcccattggacaagggcttttatcattatatgatgtccctctttgtcttttttaactgctgtttctttaaagtttgttttgtctgacataagaatagctgctttggctcgcttttggtgtccatttgtgtggaatgtcattttccacccctttaccttaagtttatgtgagtccttatgtgttaggtgagtctcctgaaggcggcagataactggttggtgaattctattcattctgcaattctgtatcttttaagtggagcatttagtccatttacattcaacatcagtattgaggtgtgaggtgactattccattcttcgtggtatttgttgcctgtgtatctttttatctgtatttttgttgtatatgtcctatgggatttatgctttaaagaggttctgttttgatgtgcttccagggtttatttcaagatttagagctccttttatcattcttgtagtgttggcttggtagtgccgaattctctcagcatttgtttttctgaaaaacactgtgtattttcttcatttgtgaagcttagtttcactggatataaaattcttggctgataattgttttgtttaagaaggctgaagatagggccatattcacttctagcttttacggtttctgctgagaaatctgctgttaatctgataggttttctttcataggttacctggtagtttcacctcacagctcttaagattctctttgtctttagataactttggatactctgatgacaatgtacctaggcaatgatatttttgcaatgaatttcccaggtgtttattgagcttctttgtatttggatatctaggtctctagcaaggagggggaagttttccttgattatttccatggacaagttttccaaacttttagatttctcttctttctcaggaatgctgattattcttaggtttgattgtttaacataatcccagatttcttggaggctttgttcatattttcttattcttttttctttgtctttgttggattgggtaattcaaaaactttgtcttcaagctctgaatttcttctgcttggattctattgctgagactttctagagcattttgcatttctataagtgcatccattcatccattgtttcctgaagttttgaatgttttttatttatgctatctctttaactgaagatttctcccctcatttcttgtatcatatttttggtttttttaaaattggacttcaccttcctcggatgcctccttgattagcttaataactgaccttctgaattatttttcaggtaaatcagggatttcttcttggtttggatgcattgctggtgagctagtatgattttttggggggtgttaaagaaccttgtttttcatattaccagagttagttttctggttccttctcacttgggtaggctctgtcagagggaaagtctaggcctcaaggctgagacttttgtcccagcaggtgttcccttgatgtagcacagtcccccttttcctaggacgtggggcttcctgagagccgaactgtagtgattgttatctctcttctggatctagccacccatcaggtctaccagactccaggctggtactggggtttgtctgcacagagtcttgtgacgtgaaccatctgtgggtctctcagccatagatacaaccacctgctccaatggaggtggtagaggatgaaatgaactctgtgagggtccttacttttggttgttcaatgcactatctttttgtgctggttggcctcctgccaggaggtggcactttctagaaagcatcagcagaggcagtcaggtggtggtggctgggggggctggggcactagaactcccaagaatatatgccctttgtcttcagctactagggtgagtaaggaaggaccatcaggtgggggcaggactagtcgtgtctgagctcagagtctccttgggcaggtctttctgtggctactgtgggaggatgggggtgtagtttccaggtcaatggatttatgttcctaggacaattatggctgcctctgctgtgtcatgcaggtcatcaggaaagtgggggaaagcaagcagtcacgtgacttgcccagctcccatgcaactcaaaaggttggtctcacttccagcgtgcaccctcccccgcaacagctccgaatctgtttccatgcagtcagtgagcaaggctgagaacttgcccaggctaccagctgcgaaaccaagtagggctgtcctacttccctgccagtggagtctgcacaccaaattcatgtccccccaccaacccccccactgcccagcccctagatctggccaggtggagattttctttttcctgtctcttttcccagttcctctggcagccctcccaaatgacccctgtgaggcaaggcagaaatggcttcctaggggacccagagagcccacagggcttttcccgctgcttcctctacccctgtattttgcttggccctctaaattgactcagctccaggtaaggtcagaatcttctcctgtggtctagatcttcaggttcccagtgaggatgtgtgtttgggggtagacggtcccccttttccacttccacagtttgggcactcacaatatttggggtgtttcccgggtcctacatgagcaatctgcttctttcagagggtgtgtgcgttctctcagctttcttgaatttatttctgcaggtggttctgcaaaaaaaattcctgatgggagacttcacatgctgctctgtgcatccgagtgggagctgcaatgtacttctgctgccacccatctgccatcaccctctaatttgtcggtaatatgcatttttaatcaatctttttttctctctctctcttttcttctcccccaaaactatactgccctttgatatcaaggaatcaaggccgtgatgttgaggggtgggcagtggatacactctttaccccttagggagcatatctagatttagatattgccaattcaagataacttaattgaaagcaaattcataatgaatacacacacacacacacacatctgcatgacaagatttttaatagttgaaagaataactaataattgtccacaggcaataagggctttttaagcaaaacagttgtgataaaacaggtcattcttagaatagtaatccagccaatagtacaggttgcttagagattatgacattaccagagttaaaattcaataatggcttctcactccctaccactgaggacaagtttatgtccttaggtttatgcttccctgaaacaataccacctgctattctccactttacatatcaacggcactggttctttatctaactctctggcacagcaggagtttgttttcttctgcttcagagctttgaatttactatttcagcttctaaactttatttgcaatgccttcccatggcagactccttctgtcattttgcctctgttcgaaaactttttccttaatttcattcttagttaataatatctgaaattattttgttgtttaacttaattattaattttatgtatgttctacctagatataatcttctagaggattgttttattctctgacttatttaacttaaatgcccactacctttaaaaattatgacatttatttaacagatatttgctgaacaaatgtttgaaaatacatgggaaagaatgcttgaaaacacttgaaattgcttgtgtaaagaaacagttttatcagttaggatttaatcaatgtcagaagcaatgatataggaaaaatcgaggaataagacagttatggataaggagaaatcaacaaactcttaaaagatattgcctcaaaagcataagaggaaataagggtttatacatgacttttagaacactgcctgggtttttggataaatggggaagttgttggaaaacaggagggatcctagatattccttagtctgaggaggagcaattaagattcacttgtttagaggctgggagtggtggctcacgcctgtaatcccagaattttgggaggccaaggcaggcagatcacctgaggtcaagagttcaagaccaacctggccaacatggtgaaatcccatctctacaaaaatacaaaaattagacaggcatgatggcaagtgcctgtaatcccagctacttgggaggctgaggaaggagaattgcttgaacctggaaggcaggagttgcagtgagccgagatcataccactgcactccagcctgggtgacagaacaagactctgtctcaaaaaaaaaaaagagagattcaaaagattcacttgtttaggccttagcgggcttagacaccagtctctgacacattcttaaaggtcaggctctacaaatggaacccaaccagactctcagatatggccaaagatctatacacacccatctcacagatcccctatcttaaagagaccctaatttgggttcacctcagtctctataatctgtaccagcataccaataaaaatctttctcacccatccttagattgagagaagtcacttattattatgtgagtaactggaagatactgataagttgacaaatctttttctttcctttcttattcaacttttattttaacttccaaagaacaagtgcaatatgtgcagctttgttgcgcaggtcaacatgtatctttctggtcttttagccgcctaacactttgagcagatataagccttacacaggattatgaagtctgaaaggattccaccaatattattataattcctatcaacctgataagttaggggaaggtagagctctcctccaataagccagatttccagagtttctgacgtcataatctaccaaggtcatggatcgagttcagagaaaaaacaaaagcaaaaccaaacctaccaaaaaataaaaatcccaaagaaaaaataaagaaaaaaacagcatgaatacttcctgccatgttaagtggccaatatgtcagaaacagcactgagttacagataaagatgtctaaactacagtgacatcccagctgtcacagtgtgtggactattagtcaataaaacagtccctgcctcttaagagttgttttccatgcaaatacatgtcttatgtcttagaataagattccctaagaagtgaacctagcatttatacaagataattaattctaatccatagtatctggtaaagagcattctaccatcatctttaccgagcatagaagagctacaccaaaaccctgggtcatcagccagcacatacacttatccagtgataaatacacatcatcgggtgcctacatacatacctgaatataaaaaaaatacttttgctgagatgaaacaggcgtgatttatttcaaataggtacggataagtagatattgaagtaaggattcagtcttatattatattacataacattaatctattcctgcactgaaactgttgctttataggatttttcactacactaatgagaacttaagagataatggcctaaaaccacagagagtatattcaagaataagtatagcacttcttatttggaaaccaatgcttactaaatgagactaagacgtgtcccatcaaaaatcctggacctatgcctaaaacacatttcacaatccctgaacttttcaaaaattggtacatgctttaactttaaactacaggcctcactggagctacagacaagaaggtgaaaaacggctgacaaaagaagtcctggtatcttctatggtgggagaagaaaactagctaaagggaagaataaattagagaaaaattggaatgactgaatcggaacaaggcaaaggctataaaaaaaattaagcagcagtatcctcttgggggccccttccccacactatctcaatgcaaatatctgtctgaaacggttcctggctaaactccacccatgggttggccagccttgccttgaccaatagccttgacaaggcaaacttgaccaatagtcttagagtatccagtgaggccaggggccggcggctggctagggatgaagaataaaaggaagcacccttcagcagttccacacactcgcttctggaacgtctgaggttatcaataagctcctagtccagacgccatgggtcatttcacagaggaggacaaggctactatcacaagcctgtggggcaaggtgaatgtggaagatgctggaggagaaaccctgggaaggtaggctctggtgaccaggacaagggagggaaggaaggaccctgtgcctggcaaaagtccaggtcgcttctcaggatttgtggcaccttctgactgtcaaactgttcttgtcaatctcacaggctcctggttgtctacccatggacccagaggttctttgacagctttggcaacctgtcctctgcctctgccatcatgggcaaccccaaagtcaaggcacatggcaagaaggtgctgacttccttgggagatgccataaagcacctggatgatctcaagggcacctttgcccagctgagtgaactgcactgtgacaagctgcatgtggatcctgagaacttcaaggtgagtccaggagatgtttcagcactgttgcctttagtctcgaggcaacttagacaactgagtattgatctgagcacagcagggtgtgagctgtttgaagatactggggttgggagtgaagaaactgcagaggactaactgggctgagacccagtggcaatgttttagggcctaaggagtgcctctgaaaatctagatggacaactttgactttgagaaaagagaggtggaaatgaggaaaatgacttttctttattagatttcggtagaaagaactttcacctttcccctatttttgttattcgttttaaaacatctatctggaggcaggacaagtatggtcgttaaaaagatgcaggcagaaggcatatattggctcagtcaaagtggggaactttggtggccaaacatacattgctaaggctattcctatatcagctggacacatataaaatgctgctaatgcttcattacaaacttatatcctttaattccagatgggggcaaagtatgtccaggggtgaggaacaattgaaacatttgggctggagtagattttgaaagtcagctctgtgtgtgtgtgtgtgtgtgtgcgcgcgtgtgtttgtgtgtgtgtgagagcgtgtgtttcttttaacgttttcagcctacagcatacagggttcatggtggcaagaagataacaagatttaaattatggccagtgactagtgctgcaagaagaacaactacctgcatttaatgggaaagcaaaatctcaggctttgagggaagttaacataggcttgattctgggtggaagcttggtgtgtagttatctggaggccaggctggagctctcagctcactatgggttcatctttattgtctcctttcatctcaacagctcctgggaaatgtgctggtgaccgttttggcaatccatttcggcaaagaattcacccctgaggtgcaggcttcctggcagaagatggtgactggagtggccagtgccctgtcctccagataccactgagctcactgcccatgatgcagagctttcaaggataggctttattctgcaagcaatacaaataataaatctattctgctaagagatcacacatggttgtcttcagttcttttttttatgtctttttaaatatatgagccacaaagggttttatgttgagggatgtgtttatgtgtatttatacatggctatgtgtgtttgtgtcatgtgcacactccacacttttttgtttacgttagatgtgggttttgatgagcaaataaaagaactaggcaataaagaaacttatacatgggagcgtctgcaagtgggagtaaaaggtgcaggagaaatctggttggaagaaagacctctataggacaggactcctcagaaacagatgttttggaagagatggggaaaggttcagtgaagggggctgaacccccttccctggattgcagcacagcagcgaggaaggggctcaacgaagaaaaagtgttccaagctttaggaagtcaaggtttaggcagggatagccattctattttattaggggcaatactatttccaacggcatctggcttttctcagcccttgtgaggctctacggggaggttgaggtgttagagatcagagcaggaaacaggtttttctttccacggtaactacaatgaagtgatccttactttactaaggaactttttcattttaagtgttgacgcatgcctaaagaggtgaaattaatcccatacccttaagtctacagactggtcacagcatttcaaggaggagacctcattgtaagcttctagggaggtggggacctaggtgaaggaaatgagccagcagaagctcacaagtcagcatcagcgtgtcatgtctcagcagcagaacagcacggtcagatgaaaatatagtgtgaagaatttgtataacattaattgagaaggcagattcactggagttcttatataattgaaagttaatgcacgttaataagcaagagtttagtttaatgtgatggtgttatgaacttaacgcttgtgtctccagaaaattcacatgctgaatccccaactcccaattggctccatttgtgggggaggctttggaaaagtaatcaggtttagaggagctcatgagagcagatccccatcatagaattattttcctcatcagaagcagagagattagccatttctcttccttctggtgaggacacagtgggaagtcagccacctgcaacccaggaagagagccctgaccaggaaccagcagaaaagtgagaaaaaatcctgttgttgaagtcacccagtctatgctattttgttatagcaccttgcactaagtaaggcagatgaagaaagagaaaaaaataagcttcggtgttcagtggattagaaaccatgtttatctcaggtttacaaatctccacttgtcctctgtgtttcagaataaaataccaactctactactctcatctgtaagatgcaaatagtaagcctgatcccttctgtctaacttcgaattctattttttcttcaacgtactttaggcttgtaatgtgtttatatacagtgaaatgtcaagttctttctttatatttctttctttcttttttttcctcagcctcagagttttccacatgcccttcctaccttcaggaacttctttctccaaacgtcttctgcctggcctccattcaaatcataaaggacccacttcaaatgccatcactcactaccatttcacaattcgcactttctttctttgtcctttttttttttagtaaaacaagtttataaaaaattgaaggaataaatgaatggctacttcataggcagagtagacacaagggctactggttgccgatttttattgttatttttcaatagtatgctaaacaaggggtagattatttatgctgcccatttttagaccataaaagataacttcctgatgttgccatggcattttttttccttttaattttatttcatttcattttaatttcgaaggtacatgtgcaggatgtgcaggcttgttacatgggtaaatgtgtgtctttctggccttttagccatctgtatcaatgagcagatataagctttacacaggatcatgaaggatgaaagaatttcaccaatattataataatttcaatcaacctgatagcttaggggataaactaatttgaagatacagcttgcctccgataagccagaattccagagcttctggcattataatctagcaaggttagagatcatggatcactttcagagaaaaacaaaaacaaactaaccaaaagcaaaacagaaccaaaaaacctccataaatacttcctacccagttaatggtccaatatgtcagaaacagcactgtgttagaaataaagctgtctaaagtacactaatattcgagttataatagtgtgtggactattagtcaataaaaacaacccttgcctctttagagttgttttccatgtacacgcacatcttatgtcttagagtaagattccctgagaagtgaacctagcatttatacaagataattaattctaatccacagtacctgccaaagaacattctaccatcatctttactgagcatagaagagctacgccaaaaccctgggtcatcagccagcacacacacttatccagtggtaaatacacatcatctggtgtatacatacatacctgaatatggaatcaaatatttttctaagatgaaacagtcatgatttatttcaaataggtacggataagtagatattgaggtaagcattaggtcttatattatgtaacactaatctattactgcgctgaaactgtggtctttatgaaaattgttttcactacactattgagaaattaagagataatggcaaaagtcacaaagagtatattcaaaaagaagtatagcactttttccttagaaaccactgctaactgaaagagactaagatttgtcccgtcaaaaatcctggacctatgcctaaaacacatttcacaatccctgaacttttcaaaaattggtacatgctttagctttaaactacaggcctcactggagctacagacaagaaggtaaaaaacggctgacaaaagaagtcctggtatcctctatgatgggagaaggaaactagctaaagggaagaataaattagagaaaaactggaatgactgaatcggaacaaggcaaaggctataaaaaaaattaagcagcagtatcctcttgggggccccttccccacactatctcaatgcaaatatctgtctgaaacggtccctggctaaactccacccatgggttggccagccttgccttgaccaatagccttgacaaggcaaacttgaccaatagtcttagagtatccagtgaggccaggggccggcggctggctagggatgaagaataaaaggaagcacccttcagcagttccacacactcgcttctggaacgtctgagattatcaataagctcctagtccagacgccatgggtcatttcacagaggaggacaaggctactatcacaagcctgtggggcaaggtgaatgtggaagatgctggaggagaaaccctgggaaggtaggctctggtgaccaggacaagggagggaaggaaggaccctgtgcctggcaaaagtccaggtcgcttctcaggatttgtggcaccttctgactgtcaaactgttcttgtcaatctcacaggctcctggttgtctacccatggacccagaggttctttgacagctttggcaacctgtcctctgcctctgccatcatgggcaaccccaaagtcaaggcacatggcaagaaggtgctgacttccttgggagatgccataaagcacctggatgatctcaagggcacctttgcccagctgagtgaactgcactgtgacaagctgcatgtggatcctgagaacttcaaggtgagtccaggagatgtttcagcactgttgcctttagtctcgaggcaacttagacaactgagtattgatctgagcacagcagggtgtgagctgtttgaagatactggggttgggagtgaagaaactgcagaggactaactgggctgagacccagtggcaatgttttagggcctaaggagtgcctctgaaaatctagatggacaactttgactttgagaaaagagaggtggaaatgaggaaaatgacttttctttattagatttcggtagaaagaactttcacctttcccctatttttgttattcgttttaaaacatctatctggaggcaggacaagtatggtcgttaaaaagatgcaggcagaaggcatatattggctcagtcaaagtggggaactttggtggccaaacatacattgctaaggctattcctatatcagctggacacatataaaatgctgctaatgcttcattacaaacttatatcctttaattccagatgggggcaaagtatgtccaggggtgaggaacaattgaaacatttgggctggagtagattttgaaagtcagctctgtgtgtgtgtgtgtgtgtgtgtgtgtcagcgtgtgtttcttttaacgtcttcagcctacaacatacagggttcatggtgggaagaagatagcaagatttaaattatggccagtgactagtgcttgaaggggaacaactacctgcatttaatgggaaggcaaaatctcaggctttgagggaagttaacataggcttgattctgggtggaagctgggtgtgtagttatctggaggccaggctggagctctcagctcactatgggttcatctttattgtctcctttcatctcaacagctcctgggaaatgtgctggtgaccgttttggcaatccatttcggcaaagaattcacccctgaggtgcaggcttcctggcagaagatggtgactgcagtggccagtgccctgtcctccagataccactgagcctcttgcccatgattcagagctttcaaggataggctttattctgcaagcaatacaaataataaatctattctgctgagagatcacacatgattttcttcagctcttttttttacatctttttaaatatatgagccacaaagggtttatattgagggaagtgtgtatgtgtatttctgcatgcctgtttgtgtttgtggtgtgtgcatgctcctcatttatttttatatgagatgtgcattttgatgagcaaataaaagcagtaaagacacttgtacacgggagttctgcaagtgggagtaaatggtgttggagaaatccggtgggaagaaagacctctataggacaggacttctcagaaacagatgttttggaagagatgggaaaaggttcagtgaagacctgggggctggattgattgcagctgagtagcaaggatggttcttaatgaagggaaagtgttccaagctttaggaattcaaggtttagtcaggtgtagcaattctattttattaggaggaatactatttctaatggcacttagcttttcacagcccttgtggatgcctaagaaagtgaaattaatcccatgccctcaagtgtgcagattggtcacagcatttcaagggagagacctcattgtaagactctgggggaggtggggacttaggtgtaagaaatgaatcagcagaggctcacaagtcagcatgagcatgttatgtctgagaaacagaccagcactgtgagatcaaaatgtagtgggaagaatttgtacaacattaattggaaggtttacttaatggaatttttgtatagttggatgttagtgcatctctataagtaagagtttaatatgatggtgttacggacctggtgtttgtgtctcctcaaaattcacatgctgaatccccaactcccaactgaccttatctgtgggggaggcttttgaaaagtaattaggtttagctgagctcataagagcagatccccatcataaaattattttccttatcagaagcagagagacaagccatttctctttcctcccggtgaggacacagtgagaagtccgccatctgcaatccaggaagagaaccctgaccacgagtcagccttcagaaatgtgagaaaaaactctgttgttgaagccacccagtcttttgtattttgttatagcaccttacactgagtaaggcagatgaagaaggagaaaaaaataagcttgggttttgagtgaactacagaccatgttatctcaggtttgcaaagctcccctcgtcccctatgtttcagcataaaatacctactctactactctcatctataagacccaaataataagcctgcgcccttctctctaactttgatttctcctatttttacttcaacatgctttactctagccttgtaatgtctttacatacagtgaaatgtaaagttctttattctttttttctttctttcttttttctcctcagcctcagaatttggcacatgcccttccttctttcaggaacttctccaacatctctgcctggctccatcatatcataaaggtcccacttcaaatgcagtcactaccgtttcaggatatgcactttctttcttttttgttttttgttttttttaagtcaaagcaaatttcttgagagagtaaagaaataaacgaatgactactgcataggcagagcagccccgagggccgctggttgttccttttatggttatttcttgatgatatgttaaacaagttttggattatttatgccttctctttttaggccatatagggtaactttctgacattgccatggcatgtttcttttaatttaatttactgttaccttaaattcaggggtacacgtacaggatatgcaggtttgttttataggtaaaagtgtgccatggttttaatgggttttttttttcttgtaaagttgtttaagtttcttgtttactctggatattggcctttgtcagaagaatagattggaaaatctttttcccattctgtagattgtctttcgctctgatggtagtttcttttgctgagcaggagctctttagtttaattagattccattggtcaatttttgcttttgctgcaattgcttttcacgctttcatcatgaaatctgtgcccgtgtttatatcatgaatagtattgccttgatttttttctaggctttttatagtttggggtttttcatttaagtctctaatccatccggagttaattttggataaggtataaggaaggagtccagtttcatttttcagcatatggctagccagttctcccccatcatttattaaattgaaaatcctttccccattgcttgcttttgtcaggtttctaaaagacagatggttgtaggtacaatatgcagtttcttcaagtcatataataccatctgaaatctcttattaattcatttcttttagtatgtatgctggtctcctctgctcactatagtgagggcaccattagccagagaatctgtctgtctagttcatgtaagattctcagaattaagaaaaatggatggcatatgaatgaaacttcatggatgacatatggaatctaatgtgtatttgttgaattaatgcataagatgcaacaagggaaaggttgacaactgcagtgataacctggtattgatgatataagagtctatagatcacagtagaagcaataatcatggaaaacaattggaaatggggaacagccacaaacaagaaagaatcaatactaccaggaaagtgactgcaggtcacttttcctggagcgggtgagagaaaagtggaagttgcagtaactgccgaattcctggttggctgatggaaagatggggcaactgttcactggtacgcagggttttagatgtatgtacctaaggatatgaggtatggcaatgaacagaaattcttttgggaatgagttttagggccattaaaggacatgacctgaagtttcctctgaggccagtccccacaactcaatataaatgtgtttcctgcatatagtcaaagttgccacttctttttcttcatatcatcgatctctgctcttaaagataatcttggttttgcctcaaactgtttgtcactacaaactttccccatgttcctaagtaaaacaggtaactgcctctcaactatatcaagtagactaaaatattgtgtctctaatatcagaaattcagctttaatatattgggtttaactctttgaaatttagagtctccttgaaatacacatgggggtgatttcctaaactttatttcttgtaaggatttatctcaggggtaacacacaaaccagcatcctgaacctctaagtatgaggacagtaagccttaagaatataaaataaactgttcttctctctgccggtggaagtgtgccctgtctattcctgaaattgcttgtttgagacgcatgagacgtgcagcacatgagacacgtgcagcagcctgtggaatattgtcagtgaagaatgtctttgcctgattagatataaagacaagttaaacacagcattagactatagatcaagcctgtgccagacacaaatgacctaatgcccagcacgggccacggaatctcctatcctcttgcttgaacagagcagcacacttctcccccaacactattagatgttctggcataattttgtagatatgtaggatttgacatggactattgttcaatgattcagaggaaatctcctttgttcagataagtacactgactactaaatggattaaaaaacacagtaataaaacccagttttccccttacttccctagtttgtttcttattctgctttcttccaagttgatgctggatagaggtgtttatttctattctaaaaagtgatgaaattggccgggcgcggtggctcacacctgtaatcccagcactttgggaggctgaggtgggcggatcacgaggtcaggagatcaagaccatcctggctaacatggtgaaaccccatctctactaaaaatacaaaaaattagccagagacggtggcgggtgcctgtagtcccagctactcgggaggctgaggcaggagaatggcgtgaacctgggaggcagagctgcagtgagcagagatcgcgccactgcacactccagcctgggtgacaaagcgagactccatctcaaaaaaaaaaaaaaaaaaaaaaagaaagaaagaaagaaaaaaaaagtgatgaaattgtgtattcaatgtagtctcaagagaattgaaaaccaagaaaggctgtggcttcttccacataaagcctggatgaataacaggataacacgttgttacattgtcacaactcctgatccaggaattgatggctaagatattcgtaattcttatccttttcagttgtaacttattcctatttgtcagcattcaggttattagcggctgctggcgaagtccttgagaaataaactgcacactggatggtgggggtagtgtaggaaaatggaggggaaggaagtaaagtttcaaattaagcctgaacagcaaagttcccctgagaaggccacctggattctatcagaaactcgaatgtccatcttgcaaaacttccttgcccaaaccccacccctggagtcacaacccacccttgaccaatagattcatttcactgagggaggcaaagggctggtcaatagattcatttcactgggagaggcaaagggctgggggccagagaggagaagtaaaaagccacacatgaagcagcaatgcaggcatgcttctggctcatctgtgatcaccaggaaactcccagatctgacactgtagtgcatttcactgctgacaagaaggctgctgccaccagcctgtgaagcaaggttaaggtgagaaggctggaggtgagattctgggcaggtaggtactggaagccgggacaaggtgcagaaaggcagaaagtgtttctgaaagagggattagcccgttgtcttacatagtctgactttgcacctgctctgtgattatgactatcccacagtctcctggttgtctacccatggacctagaggtactttgaaagttttggatatctgggctctgactgtgcaataatgggcaaccccaaagtcaaggcacatggcaagaaggtgctgatctccttcggaaaagctgttatgctcacggatgacctcaaaggcacctttgctacactgagtgacctgcactgtaacaagctgcacgtggaccctgagaacttcctggtgagtagtaagtacactcacgctttcttctttacccttagatatttgcactatgggtacttttgaaagcagaggtggctttctcttgtgttatgagtcagctatgggatatgatatttcagcagtgggattttgagagttatgttgctgtaaataacataactaaaatttggtagagcaaggactatgaataatggaaggccacttaccatttgatagctctgaaaaacacatcttataaaaaattctggccaaaatcaaactgagtgttttggatgagggaacagaagttgagatagagaaaataacatctttcctttggtcagcgaaattttctataaaaattaatagtcacttttctgcatagtcctggaggttagaaaaagatcaactgaacaaagtagtgggaagctgttaaaagaggattgtttccctccgaatgatgatggtatacttttgtacgcatggtacaggattctttgttatgagtgtttgggaaaattgtatgtatgtatgtatgtatgtgatgactggggacttatcctatccattactgttccttgaagtactattatcctactttttaaaaggacgaagtctctaaaaaaaaaatgaaacaatcacaatatgttggggtagtgagttggcatagcaagtaagagaaggataggacacaatgggaggtgcagggctgccagtcatattgaagctgatatctagcccataatggtgagagttgctcaaactctggtcaaaaaggatgtaagtgttatatctatttactgcaagtccagcttgaggccttctattcactatgtaccattttcttttttatcttcactccctccccagctcttaggcaacgtgatattgattgttttggcaacccacttcagcgaggattttaccctacagatacaggcttcttggcagtaactaacaaatgctgtggttaatgctgtagcccacaagaccactgagttccctgtccactatgtttgtacctatgtcccaaaatctcatctcctttagatgggggaggttggggagaagagcagtatcctgcctgctgattcagttcctgcatgataaaaatagaataaagaaatatgctctctaagaaatatcattgtactctttttctgtctttatattttaccctgattcagccaaaaggacgcactatttctgatggaaatgagaatgttggagaatgggagtttaaggacagagaagatactttcttgcaatcctgcaagaaaagagagaactcgtgggtggatttagtggggtagttactcctaggaaggggaaatcgtctctagaataagacaatgtttttacagaaagggaggtcaatggaggtactctttggaggtgtaagaggattgttggtagtgtgtagaggtatgttaggactcaaattagaagttctgtataggctattatttgtatgaaactcaggatatagctcatttggtgactgcagttcacttctacttattttaaacaacatattttttatgatttataatgaagtggggatggggcttcctagagaccaatcaagggccaaaccttgaactttctcttaacgtcttcaatggtattaatagagaattatctctaaggcatgtgaactggctgtcttggttttcatctgtacttcatctgctacctctgtgacctgaaacatatttataattccattaagctgtgcatatgatagatttatcatatgtattttccttaaaggatttttgtaagaactaattgaattgatacctgtaaagtctttatcacactacccaataaataataaatctctttgttcagctctctgtttctataaatatgtacaagttttattgtttttagtggtagtgattttattctctttctatatatatacacacacatgtgtgcattcataaatatatacaatttttatgaataaaaaattattagcaatcaatattgaaaaccactgatttttgtttatgtgagcaaacagcagattaaaaggctgagatttaggaaacagcacgttaagtcaagttgatagaggagaatatggacatttaaaagaggcaggatgatataaaattagggaaactggatgcagagaccagatgaagtaagaaaaatagctatcgttttgagcaaaaatcactgaagtttcttgcatatgagagtgacataataaatagggaaacgtagaaaattgattcacatgtatatatatatatagaactgattagacaaagtctaacttgggtatagtcagaggagcttgctgtaattatattgaggtgatggataaagaactgaagttgatggaaacaatgaagttaagaaaaaaaatcgagtaagagaccattgtggcagtgattgcacagaactggaaaacattgtgaaacagagagtcagagatgacagctaaaatccctgtctgtgaatgaaaagaaggaaatttattgacagaacagcaaatgcctacaagccccctgtttggatctggcaatgaacgtagccattctgtggcaatcacttcaaactcctgtacccaagacccttaggaagtatgtagcaccctcaaacctaaaacctcaaagaaagaggttttagaagatataataccctttcttctccagtttcattaatcccaaaacctctttctcaaagtatttcctctatgtgtccaccccaaagagctcacctcaccatatctcttgagtgggagcacatagataggcggtgctaccatctaacagcttctgaaattcctttgtcatatttttgagtccccactaataacccacaaagcagaataaataccagttgctcatgtacaataatcactcaactgctgtcttgtagcatacattaattaagcacattctttgaataattactgtgtccaaacaatcacactttaaaatctcacacttgtgctatcccttgcccttctgaatgtcactctgtattttaaatgaagagatgagggttgaatttcctgtgttacttattgttcatttctcgatgaggagttttcacattcacctttactggaaaacacataagtacacatcttacaggaaaaatataccaaactgacatgtagcatgaatgcttgtgcatgtagtcatataaaatcttgtagcaatgtaaacattctctgatatacacatacagatgtgtctatatgtctacacaatttcttatgctccatgaacaaacattccatgcacacataagaacacacactgttacagatgcatacttgagtgcattgacaaaattaccccagtcaatctagagaatttggatttctgcatttgactctgttagctttgtacatgctgttcatttactctgggtgatgtctttccctcattttgccttgtctatcttgtactcatactttaagtcctaacttatatgttatctcaactaagaagctatttttttttaattttaactgggcttaaagccctgtctataaactctgctacaattatgggctctttcttataatatttagtgtttttcctactaatgtacttaatctgctcattgtatattcctaccactaaattttaacctcttttatggtagagacattgtcttgtaaactcttatttccctagtatttggagatgaaaaaaaagattaaattatccaaaattagatctctcttttctacattatgagtattacactatccatagggaagtttgtttgagacctaaactgaggaacctttggttctaaaatgactatgtgatatcttagtatttataggtcatgaggttccttcctctgcctctgctatagtttgattagtcagcaagcatgtgtcatgcatttattcacatcagaatttcatacactaataagacatagtatcagaagtcagtttattagttatatcagttagggtccatcaaggaaaggacaaaccattatcagttactcaacctagaattaaatacagctcttaatagttaattatccttgtattggaagagctaaaatatcaaataaaggacagtgcagaaatctagatgttagtaacatcagaaaacctcttccgccattaggcctagaagggcagaaggagaaaatgtttataccaccagagtccagaaccagagcccataaccagaggtccactggattcagtgagctagtgggtgctccttggagagagccagaactgtctaatgggggcatcaaagtatcagccataaaaaaccataaaaaagactgtctgctgtaggagatccgttcagagagagagagagaccagaaataatcttgcttatgctttccctcagccagtgtttaccattgcagaatgtacatgcgactgaaagggtgaggaaacctgggaaatgtcagttcctcaaatacagagaacactgagggaaggatgagaaataaatgtgaaagcagacatgaatggtaattgacagaaggaaactaggatgtgtccagtaaatgaataattacagtgtgcagtgattattgcaatgattaatgtattgataagataatatgaaaacacagaattcaaacagcagtgaactgagattagaattgtggagagcactggcatttaagaatgtcacacttagaatgtgtctctaggcattgttctgtgcatatatcatctcaatattcattatctgaaaattatgaattaggtacaaagctcaaataatttattttttcaggttagcaagaactttttttttttttttttctgagatggagcattgctatggttgcccaggctggagtgcaatggcatgatccaggctcactgcaacatctgcctcccaggttcaagcgattctcctgcctcagcctcccaagtagctggcattacaggcatgtgccaccaccatgcctggctaattttctatttttagtagatagggggtttcaccatgttggtcaggctgatctcgaactcctaacatcaggtgatccaccctcctcggcctctgaatgtactgggatcacaggcgtgagccaccacacccagccaagaatgtgaattttgtagaaggatataacccatatttctctgaccctagagtccttagtatacctcccataccatgtggctcatcctccttacatacatttcccatctttcaccctaccttttcctttttgtttcagcttttcactgtgtgtcaaaatctagaaccttatctcctacctgctctgaaaccaacagcaagttgacttccattctaacccacattggcattacactaattaaaatcgatactgagttctaaaatcatctgggattttggggactatgtcttacttcatacttccttgagatttcacattaaatgttggtgttcattaaaggtccttcatttaactttgtattcatcacactcttggattcacagttatatctaaactcttatatatagcctgtataatcccaattcccaagtctgatttctaacctctgacctccaacctcagtgccaaacccatatatcaaacaatgtactgggcttatttatatagatgtcctataggcacctcagactcagcatgggtatttcacttgttatactaaaactgtttctcttccagtgttttccattttagtcattagatagctacttgcccattcaccaaggtcacagattaaaatcatttccctacctctaatcaacagttcaattctgcttcaatttgtccctatctattaatcaccactcttactgcccagtcaggtcctcattgtttcctgaacaagagtagatgctattctttccactttaagaccttatcctggctggatgcggtggctcaggcttgtaaacccagcactttgggaggccgaggcaggcagatcacttgaggtcaggagttcaagaccagcctgaccaacatggtgaaaccccatctctactaaaaatacaaaatcagccgggcgtgtggtgcatgcctgcagtcccagctattcaggtggctgaggcaggagaattgcttgaacccaggaggcggaggttgcggtgagcctagattgcaccattgcactctagcttgggcaatagggatgaaactccatctcagaagagaaaagaaaaaaagaccttattctgttacacaaatcctctcaatgcaatccatatagaataaacatgtaaccagatctcccaatgtgtaaaatcatttcaggtagaacagaattaaagtgaaaagccaagtctttggaattaacagacaaagttcaaataacagtcctcatggccttaagaatttacctaacattttttttagaatcaattttcttatatatgaattggaaacataattcctccctcacaaacacattctaagattttaaggagatattgatgaagtacatcatctgtcatttttaacagttagtggtagtgattcacacagcacattatgatctgttcttgtatgttctgttccattctgtattcttgacctggttgtattctttctgagctccagatccacatatctaagtacatctttttgcattttacaagagtgcatacaatacaatgtatccaagactgtatttctgattttatcgtaccactaaactcacaaatgtggccctattcttgtgttcacgactgacatcaccgtcatggtccaagtctgataatagaaatggcattgtcactttcttccctactgcaacagaagcccagctatttgtctcccattttctctacttctaaaatacatttcttcactaagtgagaataatcttttaaagacacaaatcaaaccatgccaccacctttcttgaattattcaatatctttcgttggcttccaggttacagaaaaataacttgtaacaaagtttaaaggtcattcatggctcctctctaccctattttataacatttccccttgtgatcagaatctcaggcacatcatccatctttctatatacaaataaagtcatatagtttgaactcacctctggttacttttaatcaaccaaatgctgtaaaatgcatttgtatcgctacgtgttaagcagtagttgattcttttcatttcttgttaatattctattctttgactataccgtaatttatcaattctactgttggtaagcatttaagtggctaccggtttgaggtttttatgattattgctgtcataagcatttctatacatgtctttggatacacacatgcatgtgtttctgaatatctaaaaatgtaattgctaggtaatagacttatcaagcatccagcatttgtggatactattaaaggttttccaaaggggttatactattgtacagtgtcaccaacagagtttgagtttctattgatccatatcaccaccaaaatttgaactgtcagtcttatctcttctcttgtctcttttttcctcttttttttccttcccttcccctctcttcgtttcttttctctcctcttctcttctttcctctcttcccttccctttctctttctcttccctatcccttctcctctcctctcccctccttttttctcctctcctctccattatttatttttccttcttctcctccatcccttccatcctctctcttcccctcttccttccttcctttctccatttcttcctcctctttccctcaatccttccttttggatatgctcatgggtgtgtatttgtctgccattgtggcattatttgaattcagaaaagagtgaaaaactactgggatcttcattctgggtctaattccacatttttttttaagaacacactctgtaaaaatgttctgtactagcatattcccaggaacttcgttaaatttaatctggctgaatatggtaaatctactttgcactttgcattctttctttagtcataccataattttaaacattcaaaatatttgtatataatatttgattttatctgtcattaaaatgttaaccttaaaattcatgtttccagaacctatttcaataactggtaaataaacactattcattttttaaatattcttttaatggatatttatttcaatataataaaaaattagagttttattataggaagaatttaccaaaagaaggaggaagcaagcaagtttaaactgcagcaatagttgtccattccaacctctcaaaattcccttggagacaaaatctctagaggcaaagaagaactttatattgagtcaacttgttaaaacatctgcttttagataagttttcttagtataaagtgacagaaacaaataagttaaactctaagatacattccactatattagcctaaaacacttctgcaaaaatgaaactaggaggatatttttagaaacaactgctgaaagagatgcggtggggagatatgcagaggagaacagggtttctgagtcaagacacacatgacagaacagccaatctcagggcaagttaagggaatagtggaatgaaggttcatttttcattctcacaaactaatgaaaccctgcttatcttaaaccaacctgctcactggagcagggaggacaggaccagcataaaaggcagggcagagtcgactgttgcttacactttcttctgacataacagtgttcactagcaacctcaaacagacaccatggtgcatctgactcctgaggagaagactgctgtcaatgccctgtggggcaaagtgaacgtggatgcagttggtggtgaggccctgggcaggttggtatcaaggttataagagaggctcaaggaggcaaatggaaactgggcatgtgtagacagagaagactcttgggtttctgataggcactgactctctgtcccttgggctgttttcctaccctcagattactggtggtctacccttggacccagaggttctttgagtcctttggggatctgtcctctcctgatgctgttatgggcaaccctaaggtgaaggctcatggcaagaaggtgctaggtgcctttagtgatggcctggctcacctggacaacctcaagggcactttttctcagctgagtgagctgcactgtgacaagctgcacgtggatcctgagaacttcagggtgagtccaggagatgcttcacttttctctttttactttctaatcttacattttggttcttttacctacctgctcttctcccacatttttgtcattttactatattttatcatttaatgcttctaaaattttgttaattttttatttaaatattctgcattttttccttcctcacaatcttgctattttaaattatttaatatcctgtctttctctcccaaccccctcccttcatttttccttctctaacaacaactcaaattatgcataccagctctcacctgctaattctgcacttagaataatccttttgtctctccacatgggtatgggagaggctccaactcaaagatgagaggcatagaatactgttttagaggctataaatcattttacaataaggaataattggaattttataaattctgtagtaaatggaatggaaaggaaagtgaatatttgattatgaaagactaggcagttacactggaggtggggcagaagtcgttgctaggagacagcccatcatcacactgattaatcaattaatttgtatctattaatctgtttatagtaattaatttgtatatgctatatacacatacaaaattaaaactaatttggaattaatttgtatatagtattatacagcatatatagcatatatgtacatatatagactacatgctagttaagtacatagaggatgtgtgtgtatagatatatgttatatgtatgcattcatatatgtacttatttatgctgatgggaataacctggggatcagttttgtctaagatttgggcagaaaaaaatgggtgttggctcagtttctcagaagccagtctttatttctctgttaaccatatgcatgtatctgcctacctcttctccgcagctcttgggcaatgtgctggtgtgtgtgctggcccgcaactttggcaaggaattcaccccacaaatgcaggctgcctatcagaaggtggtggctggtgtggctaatgccctggctcacaagtaccattgagatcctggactgtttcctgataaccataagaagaccctatttccctagattctattttctgaacttgggaacacaatgcctacttcaagggtatggcttctgcctaataaagaatgttcagctcaacttcctgattaatttcacttatttcatttttttgtccaggtgtgtaagaaggttcctgaggctctacagatagggagcacttgtttattttacaaagagtacatgggaaaagagaaaagcaagggaaccgtacaaggcattaatgggtgacacttctacctccaaagagcagaaattatcaagaactcttgatacaaagataatactggcactgcagaggttctagggaagacctcaaccctaagacatagcctcaagggtaatagctacgattaaactccaacaattactgagaaaataatgtgctcaattaaaggcataatgattactcaagacaatgttatgttgtctttcttcctccttcctttgcctgcacattgtagcccataatactataccccatcaagtgttcctgctccaagaaatagcttcctcctcttacttgccccagaacatctctgtaaagaatttcctcttatcttcccatatttcagtcaagattcattgctcacgtattacttgtgacctctcttgaccccagccacaataaacttctctatactacccaaaaaatctttccaaaccctccccgacaccatatttttatatttttcttatttatttcatgcacacacacacactccgtgctttataagcaattctgcctattctctaccttcttacaatgcctactgtgcctcatattaaattcatcaatgggcagaaagaaaatatttattcaagaaaacagtgaatgaatgaacgaatgagtaaatgagtaaatgaaggaatgattattccttgctttagaacttctggaattagaggacaatattaataataccatcgcacagtgtttctttgttgttaatgctacaacatacaaagaggaagcatgcagtaaacaaccgaacagttatttcctttctgatcataggagtaatatttttttccttgagcacatttttgccataggtaaaattagaaggatttttagaactttctcagttgtatacatttttaaaaatctgtattatatgcatgttgattaattttaaacttacttgaatacctaaacagaatctgttgtttccttgtgtttgaaagtgctttcacagtaactctgtctgtactgccagaatatactgacaatgtgttatagttaactgttttgatcacaacattttgaattgactggcagcagaagctctttttatatccatgtgttttccttaagtcattatacatagtaggcatgagactctttatactgaataagatatttaggaaccactggtttacatatcagaagcagagctactcagggcattttggggaagatcactttcacattcctgagcatagggaagttctcataagagtaagatattaaaaggagatacttgtgtggtattcgaaagacagtaagagagattgtagaccttatgatcttgatagggaaaacaaactacattcctttctccaaaagtcaaaaaaaaagagcaaatatagcttactataccttctattcctacaccattagaagtagtcagtgagtctaggcaagatgttggccctaaaaatccaaataccagagaattcatgagaacatcacctggatgggacatgtgccgagcaacacaattactatatgctaggcattgctatcttcatattgaagatgaggaggtcaagagatgaaaaaagacttggcaccttgttgttatattaaaattatttgttagagtagagcttttgtaagagtctaggagtgtgggagctaaatgatgatacacatggacacaaagaatagatcaacagacacccaggcctacttgagggttgagggtgggaagagggagacgatgaaaaagaacctattgggtattaagttcatcactgagtgatgaaataatctgtacatcaagacccagtgatatgcaatttacctatataacttgtacatgtacccccaaatttaaaataaagttaaaacaaagtataggaatggaattaattcctcaagatttggctttaattttatttgataatttatcaaatggttgtttttcttttctcactatggcgttgctttataaactatgttcagtatgtctgaatgaaagggtgtgtgtgtgtgtgaaagagagggagagaggaagggaagagaggacgtaataatgtgaatttgagttcatgaaaatttttcaataaaataatttaatgtcaggagaattaagcctaatagtctcctaaatcatccatctcttgagcttcagagcagtcctctgaattaatgcctacatgtttgtaaagggtgttcagactgaagccaagattctacctctaaagagatgcaatctcaaatttatctgaagactgtacctctgctctccataaattgacaccatggcccacttaatgaggttaaaaaaaagctaattctgaatgaaaatctgagcccagtggaggaaatattaatgaacaaggtgcagactgaaatataaattttctgtaataattatgcatatactttagcaaagttctgtctatgttgactttattgcttttggtaagaaatacaactttttaaagtgaactaaactatcctatttccaaactattttgtgtgtgtgcggtttgtttctatgggttctggttttcttggagcatttttatttcattttaattaattaattctgagagctgctgagttgtgtttactgagagattgtgtatctgcgagagaagtctgtagcaagtagctagactgtgcttgacctaggaacatatacagtagattgctaaaatgtctcacttggggaattttagactaaacagtagagcatgtataaaaatactctagtcaagtgctgcttttgaaacaaatgataaaaccacactcccatagatgagtgtcatgattttcatggaggaagttaatattcatcctctaagtatacccagactagggccattctgatataaaacattaggacttaagaaagattaatagactggagtaaaggaaatggacctctgtctctctcgctgtctcttttttgaggacttgtgtgtgtgtgtgtgtgtgtgtgtgtgtgtgttgtggtcagtggggctggaataaaagtagaatagacctgcacctgctgtggcatccattcacagagtagaagcaagctcacaatagtgaagatgtcagtaagcttgaatagtttttcaggaactttgaatgctgatttagatttgaaactgaggctctgaccataaccaaatttgcactatttattgcttcttgaaacttatttgcctggtatgcctgggcttttgatggtcttagtatagcttgcagccttgtccctgcagggtattatgggtaatagaaagaaaagtctgcgttacactctagtcacactaagtaactaccattggaaaagcaacccctgccttgaagccaggatgatggtatctgcagcagttgccaacacaagagaaggatccatagttcatcatttaaaaaagaaaacaaaatagaaaaaggaaaactatttctgagcataagaagttgtagggtaagtctttaagaaggtgacaatttctgccaatcaggatttcaaagctcttgctttgacaattttggtctttcagaatactataaatataacctatattataatttcataaagtctgtgcattttctttgacccaggatatttgcaaaagacatattcaaacttccgcagaacactttatttcacatatacatgcctcttatatcagggatgtgaaacagggtcttgaaaactgtctaaatctaaaacaatgctaatgcaggtttaaatttaataaaataaaatccaaaatctaacagccaagtcaaatctgtatgttttaacatttaaaatattttaaagacgtcttttcccaggattcaacatgtgaaatcttttctcagggatacacgtgtgcctagatcctcattgctttagttttttacagaggaatgaatataaaaagaaaatacttaaattttatccctcttacctctataatcatacataggcataattttttaacctaggctccagatagccatagaagaaccaaacactttctgcgtgtgtgagaataatcagagtgagattttttcacaagtacctgatgagggttgagacaggtagaaaaagtgagagatctctatttatttagcaataatagagaaagcatttaagagaataaagcaatggaaataagaaatttgtaaatttccttctgataactagaaatagaggatccagtttcttttggttaacctaaattttatttcattttattgttttattttattttattttattttattttgtgtaatcgtagtttcagagtgttagagctgaaaggaagaagtaggagaaacatgcaaagtaaaagtataacactttccttactaaaccgactgggtttccaggtaggggcaggattcaggatgactgacagggcccttagggaacactgagaccctacgctgacctcataaatgcttgctacctttgctgttttaattacatcttttaatagcaggaagcagaactctgcacttcaaaagtttttcctcacctgaggagttaatttagtacaaggggaaaaagtacagggggatgggagaaaggcgatcacgttgggaagctatagagaaagaagagtaaattttagtaaaggaggtttaaacaaacaaaatataaagagaaataggaacttgaatcaaggaaatgattttaaaacgcagtattcttagtggactagaggaaaaaaataatctgagccaagtagaagaccttttcccctcctacccctactttctaagtcacagaggctttttgttcccccagacactcttgcagattagtccaggcagaaacagttagatgtccccagttaacctcctatttgacaccactgattaccccattgatagtcacactttgggttgtaagtgactttttatttatttgtatttttgactgcattaagaggtctctagttttttatctcttgtttcccaaaacctaataagtaactaatgcacagagcacattgatttgtatttattctatttttagacataatttattagcatgcatgagcaaattaagaaaaacaacaacaaatgaatgcatatatatgtatatgtatgtgtgtatatatacacatatatatatatattttttttcttttcttaccagaaggttttaatccaaataaggagaagatatgcttagaactgaggtagagttttcatccattctgtcctgtaagtattttgcatattctggagacgcaggaagagatccatctacatatcccaaagctgaattatggtagacaaagctcttccacttttagtgcatcaatttcttatttgtgtaataagaaaattgggaaaacgatcttcaatatgcttaccaagctgtgattccaaatattacgtaaatacacttgcaaaggaggatgtttttagtagcaatttgtactgatggtatggggccaagagatatatcttagagggagggctgagggtttgaagtccaactcctaagccagtgccagaagagccaaggacaggtacggctgtcatcacttagacctcaccctgtggagccacaccctagggttggccaatctactcccaggagcagggagggcaggagccagggctgggcataaaagtcagggcagagccatctattgcttacatttgcttctgacacaactgtgttcactagcaacctcaaacagacaccatggtgcacctgactcctgaggagaagtctgccgttactgccctgtggggcaaggtgaacgtggatgaagttggtggtgaggccctgggcaggttggtatcaaggttacaagacaggtttaaggagaccaatagaaactgggcatgtggagacagagaagactcttgggtttctgataggcactgactctctctgcctattggtctattttcccacccttaggctgctggtggtctacccttggacccagaggttctttgagtcctttggggatctgtccactcctgatgctgttatgggcaaccctaaggtgaaggctcatggcaagaaagtgctcggtgcctttagtgatggcctggctcacctggacaacctcaagggcacctttgccacactgagtgagctgcactgtgacaagctgcacgtggatcctgagaacttcagggtgagtctatgggacccttgatgttttctttccccttcttttctatggttaagttcatgtcataggaaggggagaagtaacagggtacagtttagaatgggaaacagacgaatgattgcatcagtgtggaagtctcaggatcgttttagtttcttttatttgctgttcataacaattgttttcttttgtttaattcttgctttctttttttttcttctccgcaatttttactattatacttaatgccttaacattgtgtataacaaaaggaaatatctctgagatacattaagtaacttaaaaaaaaactttacacagtctgcctagtacattactatttggaatatatgtgtgcttatttgcatattcataatctccctactttattttcttttatttttaattgatacataatcattatacatatttatgggttaaagtgtaatgttttaatatgtgtacacatattgaccaaatcagggtaattttgcatttgtaattttaaaaaatgctttcttcttttaatatacttttttgtttatcttatttctaatactttccctaatctctttctttcagggcaataatgatacaatgtatcatgcctctttgcaccattctaaagaataacagtgataatttctgggttaaggcaatagcaatatttctgcatataaatatttctgcatataaattgtaactgatgtaagaggtttcatattgctaatagcagctacaatccagctaccattctgcttttattttatggttgggataaggctggattattctgagtccaagctaggcccttttgctaatcatgttcatacctcttatcttcctcccacagctcctgggcaacgtgctggtctgtgtgctggcccatcactttggcaaagaattcaccccaccagtgcaggctgcctatcagaaagtggtggctggtgtggctaatgccctggcccacaagtatcactaagctcgctttcttgctgtccaatttctattaaaggttcctttgttccctaagtccaactactaaactgggggatattatgaagggccttgagcatctggattctgcctaataaaaaacatttattttcattgcaatgatgtatttaaattatttctgaatattttactaaaaagggaatgtgggaggtcagtgcatttaaaacataaagaaatgaagagctagttcaaaccttgggaaaatacactatatcttaaactccatgaaagaaggtgaggctgcaaacagctaatgcacattggcaacagccctgatgcctatgccttattcatccctcagaaaaggattcaagtagaggcttgatttggaggttaaagttttgctatgctgtattttacattacttattgttttagctgtcctcatgaatgtcttttcactacccatttgcttatcctgcatctctcagccttgactccactcagttctcttgcttagagataccacctttcccctgaagtgttccttccatgttttacggcgagatggtttctcctcgcctggccactcagccttagttgtctctgttgtcttatagaggtctacttgaagaaggaaaaacagggggcatggtttgactgtcctgtgagcccttcttccctgcctcccccactcacagtgacccggaatctgcagtgctagtctcccggaactatcactctttcacagtctgctttggaaggactgggcttagtatgaaaagttaggactgagaagaatttgaaagggggctttttgtagcttgatattcactactgtcttattaccctatcataggcccaccccaaatggaagtcccattcttcctcaggatgtttaagattagcattcaggaagagatcagaggtctgctggctcccttatcatgtcccttatggtgcttctggctctgcagttattagcatagtgttaccatcaaccaccttaacttcatttttcttattcaatacctaggtaggtagatgctagattctggaaataaaatatgagtctcaagtggtccttgtcctctctcccagtcaaattctgaatctagttggcaagattctgaaatcaaggcatataatcagtaataagtgatgatagaagggtatatagaagaattttattatatgagagggtgaaacctaaaatgaaatgaaatcagacccttgtcttacaccataaacaaaaataaatttgaatgggttaaagaattaaactaagacctaaaaccataaaaatttttaaagaaatcaaaagaagaaaattctaatattcatgttgcagccgttttttgaatttgatatgagaagcaaaggcaacaaaaggaaaaataaagaagtgaggctacatcaaactaaaaaatttccacacaaaaaagaaaacaatgaacaaatgaaaggtgaaccatgaaatggcatatttgcaaaccaaatatttcttaaatattttggttaatatccaaaatatataagaaacacagatgattcaataacaaacaaaaaattaaaaataggaaaataaaaaaattaaaaagaagaaaatcctgccatttatgcgagaattgatgaacctggaggatgtaaaactaagaaaaataagcctgacacaaaaagacaaatactacacaaccttgctcatatgtgaaacataaaaaagtcactctcatggaaacagacagtagaggtatggtttccaggggttgggggtgggagaatcaggaaactattactcaaagggtataaaatttcagttatgtgggatgaataaattctagatatctaatgtacagcatcgtgactgtagttaattgtactgtaagtatatttaaaatttgcaaagagagtagatttttttgtttttttagatggagttttgctcttgttgtccaggctggagtgcaatggcaagatcttggctcactgcaacctccgcctcctgggttcaagcaaatctcctgcctcagcctcccgagtagctgggattacaggcatgcgacaccatgcccagctaattttgtatttttagtagagacggggtttctccatgttggtcaggctgatccgcctcctcggccaccaaagggctgggattacaggcgtgaccaccgggcctggccgagagtagatcttaaaagcatttaccacaagaaaaaggtaactatgtgagataatgggtatgttaattagcttgattgtggtaatcatttcacaaggtatacatatattaaaacatcatgttgtacaccttaaatatatacaatttttatttgtgaatgatacctcaataaagttgaagaataataaaaaagaatagacatcacatgaattaaaaaactaaaaaataaaaaaatgcatcttgatgattagaattgcattcttgatttttcagatacaaatatccatttgactgtttactcttttccaaaacaatacaataaattttagcactttatcttcattttccccttcccaatctataattttatatatatatattttagatattttgtatagttttactccctagattttctagtgttattattaaatagtgaagaaatgtttacacttatgtacaaaatgttttgcatgcttttcttcatttctaacattctctctaagtttattctattttttcctgattatccttaatattatctctttctgctggaaatatattgttacttttggtttatctaaaaatggcttcattttcttcattctaaaatcatgttaaattaataccactcatgtgtaagtaagatagtggaataaatagaaatccaaaaactaaatctcacaaaatataataatgtgatatataaaaatatagcttttaaatttagcttggaaataaaaaacaaacagtaattgaacaactatactttttgaaaagagtaaagtgaaatgcttaactgcatataccacaatcgattacacaattaggtgtgaaggtaaaattcagtcacgaaaaaactagaataaaaatatgggaagacatgtatataatcttagagataacagtgttatttaattatcaacccaaagtagaaactatcaagggagaaataaattcagtcaacaataaaagcatttaagaagttattctaggctgggagcggtggctcacacctgcaattgcagcactttgggaggcctagacaggcggatcacgacgtcaggagttcaagatcagcctggccaacatagtgaaacctcatcgctactaaaaatataaaaacttagcctggcgtggtggcaggcatgtgtaatcccagcaatttgggaggctgaggcaggagaatcgcttgatcctgggaggcagaggttgcagtgagccaagattgtgccactgcattccagcccaggtgacagcatgagactccgtcacaaaaaaaaaagaaaaaaaaggggggggggggcggtggagccaagatgaccgaataggaacagctccagtctatagctcccatcgtgagtgacgcagaagacgggtgatttctgcatttccaactgaggtaccaggttcatctcacagggaagtgccaggcagtgggtgcaggacagtagtgcagtgcactgtgcatgagccgaagcagggcgaggcatcacctcacccgggaagcacaaggggtcagggaattccctttcctagtcaaagaaaagggtgacagatggcacctggaaaatcgggtcactcccgccctaatactgcgctcttccaacaagcttaacaaatggcacaccaggagattatatcccatgcctggctcagagggtcctacgcccatggagcctcgctcattgctagcacagcagtctgaggtcaaactgcaaggtggcagtgaggctgggggaggggtgcccaccattgtccaggcttgagcaggtaaacaaagccgcctggaagctcgaactgggtggagcccaccacagctcaaggaggcctgcctgcctctgtaggctccacctctaggggcagggcacagacaaacaaaagacaacaagaacctctgcagacttaaatgtccctgtctgacagctttgaagagagtagtggttctcccagcacatagcttcagatctgagaacaggcagactgcctcctcaagtgggtccctgacccccgagtagcctaactgggaggcatcccccagtagggcggactgacacctcacatggctggtactcctctaagacaaaacttccagaggaatgatcaggcagcagcatttgcggttcaccaatatccactgttctgcagccaccgctgctgatacccaggaaaacagcatctggagtggacctccagtaaactccaacagacctgcagctgagggtcctgactgttagaaggaaaactaacaaacagaaaggacatccacaccaaaaacccatctgtacatcaccatcatcaaagaccaaaggtagataaaaccataaagatggggaaaaagcagagcagaaaaactggacactctaaaaatgagagtgcctctccttctccaaagtaacgcagctcctcaccagcaatggaacaaagctgggcagagaatgactttgacgagttgagagaggaaggcttcagaagatcaaactactccaagctaaaggaggaagttcgaacaaacggcaaagaagtaaaaaactttgaaaaaaaattagatgaatggataactagaataaccaatgcacagaagtccttaaaggacctgatggagctgaaaaccaaggcaggagaactacgtgacaaatacacaagcctcagtaaccgatgagatcaactggaagaaagggtatcaatgacggaagatgaaatgaatgaaatgaagcatgaagagaagtttagagaaaaaagaataaaaagaaacgaacaaagcctccaagaaatatgggactatgtgaaaagaccaaatctacatctaattggtgtagctgaaagtgatggggagaatggaaccaagttggaaaacactctgcaggatattatccaggagaacttccccaatctagcaaggcagcccaaattcacattcaggaaatacagagaacgccacaaagatactcctagagaaaagcaactccaagacacataactgacagattcaccaaagttgaaatgaaggaaaaaatgttaagggcagccagagagaaaggtcgggttacccacaaagggaagcccatcagactaacagctgatctatcggcagaaactctacaagccagaagaaagtgggggccaatattcaacattgttaaagaaaagaattttcggcccagaatttcatatccagccaaactaagcttcataagcattggagaaataaaatcctttacagacaagcaaatgctgagagattttgtcaccaccaggcctgccctacaagagctcctgaaggaagcactaaacatggaaaggaacaactagtatcagccactgcaaaaacatgccaaattgtaaacgaccatcaaggctaggaagaaactgcatcaaggagcaaaataaccagctaacatcataatgacaggatcaaattcatacataacaatactcaccttaaatgtaaataggctaaatgctccaattaaaagacacagactggcaaattggataaggagtcaagacccatctgtcgttatgtattcaggaaacccatctcacgtgcagagacacacataggctcgaaataaaaggatggaggaatatctaccaagcaaatggaaaacaaaaaaaggcaggggttgcaatcctagtctctgataaaacagattttaaaccaacaaagatcaaaagagacaaagaaggccattacataatggcaaagggatctattcaagaagaagaactaactatactaaatatatatgcacccaatacaggagcacccagattcataaaacaagtcctgagtgacctacaaagagacttagatgcccacacaataataatgggagactttaacaccccactgtcaacattagacagatcaacgagacagaaagttaacaaggatatccaggaattggactcagctctgcaccaagcagacctaatagacatctacagaactctccaccccaaatcaacagaatatacattcttttcagcaccacaccacacctattccaaaactgaccacatagttggaagtaaagctctcctcagcaaatgtaaaagaacagaaactataacaaactgtctctcagaccacagtgcaatcaaactagaactcaggattaagaaactcactcaaaaccactcagctacatggaaactgaacagcctgctcctgaatgactactgggtacataacaaaatgaaggcagaaataaagatgttctttgaaacaacgagaacaaagacacaacacaccagaatctctgagacacattcaaagcagtgtgtagagggaaatttatagcactaaatgcccacaagggaaagcaggaaagatctaaaattgacaccctaacatcacaattaaaaaactagagaagcaggagcaaacacattcaaaagctaacagaagacaagaaataactaagatcagagcagaagtgaagaagatagagacacaaaaaacccttcaaaaaaatcaatgaatccagaagctgtttttttgaaaagatcaacaaaattgatagactgctagcaagactaataaagaagaaaggggagaagaatcaaatagacgcaataaaaaatgacacggggtatcaccactgatcccacagaaatacaaactaccgtcagagaatactataaacacctctacgcaaataaactagaaaatctagaagaaatggataaattcctcgacacatacactctgccaagactaaaccaggaagaagttgtatctctgaatagaccaataacaggctctgaaattgaggcaataattaatagcttatcaaccaaaaaaagtccgggaccagtaggattcatagccgaattctaccagaggtacaaggaggagctggtaccattccttctgaaactattccaatcaatagaaaaagagggaatcctccctaactcattttatgaggccagcatcatcctgataccaaagcctgacagagacacaacaaaaaaagagaatgttacaccaatatccttgatgaacatcgatgcaaaaatcctcaataaaatactggcaaactgaatccagcagcacatcaaaaagcttatcctccatgatcaagtgggcttcatccctgccatgcaaggctggttcaacatacgaaatcaataaacataatccagcatataaacagaaccaaagacacaaaccatatgattatctcaatagatgcagaaaaggcctttgacaaaattcaacaatgcttcatgctaaaaactctcaataaattaggtattgatgggacatatctcaaaataataagagctatctatgacaaacccacagccaatatcatactgagtggacaaaaactggaagcattccctttgaaaactggcacaaggcagggatgccctctctcaccactcctattcaacatagtgttggaagttctggccagggcaatcaggcaggagaaggaaataaagggcattcaattaggaaaagaggaaggtgaaattgtccctgtttgcagatgacatgattgtatatctagaaaaccccattgtctcagcccaaaatctccttaagctgataagcaacttcagcaaagtctcaggatataaaatcagtgtgcaaaaatcacaagtattcctatgcaccaataacagacaaacagagagccaaatcatgagtgaactcccattcacaattgcttcaaagagaataaaatacctaggaatccaacttacaagggatgtgaaggacctcttcaaggagaactacaaaccactgctcaatgaaataaaagaggatacaaacaaatggaagaacattccatgcttatgggtaggaagaatcatatcgtgaaaatggtcatactgcccaaggtaatttatagattcaatgccatccccatcaagctaccaatgactttcttcacagaactggaaaaaactactttaaagttcatatggaatcaaaaaagagcccacatcaccaaggcaatcctaagccaaaagaacaaagctggaggcatcacgctacctgacttcaaactatactacaatgctacggtaaccaaaacagcatggtactggtaccaaaacagagatctagaccaatggaacagaacagagccctcagaaataatgccgcatatctacaactatccgatctttgacaaacctgagagaaacaagcaatggggaaaggattccctatttaataaatggtgctgggaaaactggctagccatatgtagaaagctgaaactggatccttccttacaccttatacaaaaattaattcaagatggattaaagacttaaacattagacctaaaaccataaaaaccctagaaaaaaacctaggcaataccattcaggacataggcatgggcaaggacttcatgtctaaaacaccaaaacgaatggcaacaaaagacaaaatggacaaacgggatctaattaaactaaagagcttctgcacagctaaagaaactaccatcagagtgaacaggcaacctacaaaatgggagaaaatttttgcaatctactcatctgacaaagggctaatatccagaatctacaatgaactcaaacaaatttacaagaaaaaacaaacaaccccatcaaaaagtgggcaaaggatatgaacagacacttctcaaaagaagacatttatgtaatcaaaaaacacatgaaaaaatgctcatcatcactagccatcagagaaatgcaaatcaaaaccacaatgagataccatctcacaccagttagaatggcgatcattaaaaagtcaggaaacaacaggtgctggagaggatgtggagaaacaggaacaacttttacactgttggtgggactgtaaactagttcaaccattgcggaagtcagtgtggcaattcctcaggaatctagaactagaaataccatttgacccagccatcccattactgggtagatacccaaaggattataaatcatgctgctataaagacacatgcacacgtatgtttattgcagcactattcacaatagcaaagacttggaaccaacccaaatgtccaacaacgatagattggattaagaaaatgtggcacatatacaccatggaatactatgcagccataaaaaatgatgagttcatgtcctttgtagggacatggatgaagctggaaactatcattctcagcaaactatcacaaggacaataaaccaaacaccgcatgttctcactcataggtgggaattgaacaatgagaacacatggacacatgaagaggaacatcacactctggggactgttatggggtggggggcaggggcagggatagcactaggagatatacctaatgctaaatgacgagttaatgggtgcagcacaccaacatggcacatgtatacatatataacaaacctgccgttgtgcacatgtaccctaaaacttgaagtataataataaaaaaaagttatcctattaaaactgatctcacacatccgtagagccattatcaagtctttctctttgaaacagacagaaatttagtgttttctcagtcagttaac

SEQ ID NO: 5304 - DNA, 521 bp, Homo sapiens; identical to SEQ ID NO: 4220
  misc_feature (1)..(521): n=a,t,g or c

SEQ ID NO: 5305 - DNA, 481 bp, Homo sapiens; identical to SEQ ID NO: 2781

SEQ ID NO: 5306 - DNA, 357 bp, Homo sapiens
gagcggtggagggcgtcactgggtttcggcgtctggcaagcgattcagctgtctgctccctagcagccggccttcgggtcgggcgtcttccccggctactgccgcttcagttcttccggtgtggccacgagtcgggttgcacttctgtgatccatcctcatcttctaaagatgcatcctgacttatctccacacttgcacactgaagaatgcaacgtcttgattaacttgcttaaggaatgtcacaaaaatcacaacattctgaaattttttgggtattgtaatgatgttgatcgggggtggagagaatgcctctagagtgatgtacatagagaacaggagcccgagcagggggcat

SEQ ID NO: 5307 - DNA, 1086 bp, Homo sapiens; identical to SEQ ID NO: 414

SEQ ID NO: 5308 - DNA, 486 bp, Homo sapiens
  misc_feature (1)..(486): n=a,t,g or c
tagcaccatgatcctcgcgctggagctgtgtgaggagatcgtggtctatgggatggtcagcgacantanctgcagggagaagagccacccctcagtgccttaccactactttgagaagggccggctagatgagtgtcagatgtacctggcacacgagcaggcgccccgaagcgccaccgcttcatcactgagaaggcggtcttctcccgctgggccaagaagaggcccatcgtgttcgcccatccgtcctggaggactgagtagcttccgtcgtcctgccagccgccatgccgttgcgaggcctccgggatgtcccatcccaagccatcacactccacaaaaacatttaatttatgggatcctgcctcctgccacgtgctgggtgggancttaaggttccttcccaccccattgtgggcgacatttggagccattttcaggcttccattccctgagtaattcatgggcattttgggggttcancca

SEQ ID NO: 5309 - DNA, 1515 bp, Homo sapiens; identical to SEQ ID NO: 2773

SEQ ID NO: 5310 - DNA, 480 bp, Homo sapiens
  misc_feature (1)..(480): n=a,t,g or c
gggaagtttactgggccatcacagacttttgttctagtgattgtatgtattaggagtcatagcatgccctacggagatctggattcttatacactaagatgtgtcttaagaatcacagtgcgtgcttcatccctttattgaagaacagaaaattatgactactctacaaggtggataatattttggtacctgtggctggccacagccctgttcctcaaagctgaattgatagatttctctttgacttccaagacctagcagttataaggcaccttgaaataaattgtttgtgcctggaaatgcagggagggcaatagctttgtaaattggnttacatttttctccttgaatttttctagggtcctagtgcttccgaatcatttaatggcattgtcggatatccttttacatttcaattgcaatccatgaaattacatttagaagattcttagtacttaacggtagtcttcccatgaattt

SEQ ID NO: 5311 - DNA, 416 bp, Homo sapiens
  misc_feature (1)..(416): n=a,t,g or c
atttcagangaagtttattaagaggttttaggctttaagcatatgtgaaaagcaaaaattacattttaaagtatataatttgcattttccaccttctcaatgccaatgaaatattctaggagactctataagataaccaattgattttctactactcccaaattttaactttgtaatttaaagaggaataggcaaatagagctgctgtggttctggttctccctgcaggatgaagggggcctgcaaaatgtctcctacttccattctaggtcattcagcaaggtgccttcctctggatgcactgtctgtatacttttgccatgttgcatcacataatggattctggcccaccttacaccattttgactgtcagtaaaagaatggtatggtggcccatttcttcntttattaatagc

SEQ ID NO: 5312 - DNA, 371 bp, Homo sapiens
tttgacacgtgaagggttatttatggttatgatgaccctgtcctgcaacgagggactggcagccactactgaggaggagggtcccatctctctcctgtcggctttcaccgaggtcacagccagacgtggggcaaaggtgttccctgtcctacccagccattcctgggcctgccgcctaggggctcacagggcccaggagtccccagctcacaggccagggcatcaggccaggcgcgctcggtgcacaccgcacctgtggaggacctgggtacactcaggagaccaagagcactggcgggtcaggatggttggcgttcagctcctacggggtggggagaagtctgtagccgagagcccagccccctcctgcc

SEQ ID NO: 5313 - DNA, 419 bp, Homo sapiens
aagtattctgtccctttaatagctttgttttaggggtaactcccctcgccttgtggggaggcttaggacgggcgggtgcaatcctcgaaggggagtctcagcgaccatgggggacaccatccacatgcaggcggtagttggggcctcggcagcgcctctctggggtgccgggggtccctgttgcccctcagtgccctgtggcgcaagggctgcaggggccggctgttaccgctgaggctctggaagatctgagatggaggattctggctcaggagtctcagggagtgcatctgaagggaggtgatattgagggcccggtcaatgaggatccaggtgacagtctcggagcagggcggggtgctgagagagccctgataggtgatgaaaccgaagattcagggaacaggagctccaggctc

SEQ ID NO: 5314 - DNA, 270 bp, Homo sapiens; identical to SEQ ID NO: 64

SEQ ID NO: 5315 - DNA, 255 bp, Homo sapiens
tttagtttagcaccatttattaagtgatctcagctgttgttgtagctgctgcgtgtcaccgtgttcttaaaacataaaatgctcttccgattcctcttgtccaggacagaaggatcttccaggtagcacgccaacagaacaagagactccgatgacgccagcttcaatgatggtgccatccagagagggagagggtcatggcacattcaaccgcggcttccagaggttttgaaaaaggagcctttgggggcccag

SEQ ID NO: 5316 - DNA, 358 bp, Homo sapiens
caggttgaataaaatttaattgataatgctttatattaatattctcttttgcatttaaatattatatgaatactacaagcatccaacaagaaataaccttcataaattagcataatttatagcaggaaacccaaataaactaaacttggctgcctaaaataatttgtctaaagggggatatgctctttgtaagtatcatgctgataaaaccataaaaattcttttagaggaatgaggattaaaatgaaatttctttatgacacggaaaaaaataataatttgtctaaaagtgtaaaattttaaaagcaaacattatacacataaccagcacaattatttccatcttaaaacattggtt

SEQ ID NO: 5317 - DNA, 266 bp, Homo sapiens
atggctaatggtgacacactttattaatttaaaaacacgcccttcccacatagtgcgtgaggcatgtgcacattttcctagaaggacatgaatagtgatgtggaggtacggtggaggtcaggcatctacagggtcattcgaggaggaacagattcaagctttcggacgatcagtgttttgtaaatagcagcatcatcagatctaagacaacattggacctggcagggccttttctttgggtggcattaattactccagattcagac

SEQ ID NO: 5318 - DNA, 287 bp, Homo sapiens
aacgtaaacacaaagtctcatttatttttgtctgaagcacacaggagctcactcagcacaataacagtaagcgaatcatacaaatattgagaaaaaatgttcctatgaatacatacatgtatattcttaagagtagcgatcaggagtttaacaacaaatgtaaagtggttttctctaaagaatgctttctgacaggcttttgggttggaaatggacaggtaaatcactgtcacataacaggtaagctaagaataacttctgttacccaagtcatttgaaccctgtgg

SEQ ID NO: 5319 - DNA, 291 bp, Homo sapiens
  misc_feature (1)..(291): n=a,t,g or c
ttttttttttttcttgtggccattcccaggtttaattacaaaccgatccgaacatcccatctgggtcgacagctgggagggcaggattggggggaagctgctgggcgcacggncnaggcaaccacgtccttcccctgctcccaggtggagtaggggcctcacgactgcctcgatatccactgtcttggagcagcctggctaccccgagatcccaggtgacctcaaggctgcctgcacttcagcgccanatgntatcctggcctgagaaccccaaagcaccttaagcgtccc

SEQ ID NO: 5320 - DNA, 413 bp, Homo sapiens
  misc_feature (1)..(413): n=a,t,g or c
aaaaatctatcaccnaagaatattgaaagaaattcagtaaaacaagatgtgtctcatagttaaggagagacataaaaataaaaatgtcatttaacagtttgaatttaggatttactgttaatcagaaacaccgaggaggcttaactcaccttttaattgagaatgtgggaaggaaagagagtaaacacattaactttagtagcagaagtgctgctaaaagaaatacgtgaaaggaaatgtaacagacaaattggcttttatcccttttgataccaatatatgtgtatacaagtcataacactggtaagtagtgtcttaagggccaaaaatggtagcttcttggtttataaaacctaatggagccacttggaaaaaatttacactcnggaaattaaataaggaccctaataatg

SEQ ID NO: 5321 - DNA, 293 bp, Homo sapiens
ctcttctaattcattgtttttcttttaaacattgtgcacaagcttatattcacatagaaagcatatacatcttataaatcacagacttttttttaagtagtactccagtttatcagctcattttacacacatatttaggcaacagaatgtataaatctaccgcaatacagaggacacactatccagaaaagaatgaacaaagaacaggctgttgcaaaaatatttagtccctttacacatatagtcaaacttcattaatgcaaaaaatgtagtggttattaaatgtctgaaag

SEQ ID NO: 5322 - DNA, 400 bp, Homo sapiens
tttttttttttttttttccagatcaggaagttttattgctgacatgcaggaagagtccccatgtagtacaaaaatatgtctttatacaaacttttttgtgactttttccgtttctttacaataggacttctctcagtcgtgtgacacccagtgagggctgacccatcctcctctcctttgcttcaccaggaatgtcatcagacacatggcttgaccttggaagggcccagtctgtctgacagggctttgcagacccggcggctattgctttgaaaaggaggagaaagaccacgcacgggcagcagctgggagggacccggtggctggctgagagggggctccgctggcgacgggccctggcaggctttcaggccctcacaggaggacagtcaagggctgg

SEQ ID NO: 5323 - DNA, 149 bp, Homo sapiens
tttcacacgcacaacttgggaatttaatcttcacttttcctcccataaatatagagtgagggtgtgataccagccccagcccagtctccttggggtctgcatctctgcttcctggcagcctcttgagtcgacttggggatttgacgtca

SEQ ID NO: 5324 - DNA, 266 bp, Homo sapiens
  misc_feature (1)..(266): n=a,t,g or c
ttttattatccagacacacgtatcagagcctgctaacatccagttgtgggaagagcagcaagcagtacaccaggagccacaggaagagantaaaatacatcatatccggctgctggacaagctgtgtcagggagtcactctgcgggctgtggctccccagtgacatggcttctcctgagctgttggccttcctacagaagaaacacagaggaaacgcagttaccaagcaggttcccagggaaagtggaccccacccantgctaccc

SEQ ID NO: 5325 - DNA, 510 bp, Homo sapiens
  misc_feature (1)..(510): n=a,t,g or c
gtactcattaatcccctcctcaatttttaacagaattataaaagcaaagtcaaaaggtccttcaggatgactgggaggcttcctaggctaacttttgcatttgaaaatggaaaaaataaattacttgatatttgtgataagactaagatttcttaaaagtctgcacatcaatatattacctgggcttaggagggtgagggcacagtatccatctgcaccctctcctcgtattttttaaaaacaggcaaaatatgtaagaaaaggctggtgcacgttggaagacagagcgtgcctgtctatgccagtgctgctgtgccctgcagcctgggnaggatgggagtcggatgctggggcctcatgnccacttagggccaataacatactcaagactctacagccctttcaccagcaaagtatgncctgaggggaaccactgggtgttgggagttgaaggcacacaaagcaggggctaaagggcaattggggtttcacggtgcaggcgccttgagg

SEQ ID NO: 5326 - DNA, 498 bp, Homo sapiens
  misc_feature (1)..(498): n=a,t,g or c
ccccgtcagtcaatcttatctggtaatgggatcattactgttatccagtgtcaatggtctcagtagtatttccattcaaaaataatttagcttttagattaaggatttctctttttgttttattaaacattgaaaggtgggactttaaaaaatggtataaatctagattttaaggattcttttcttacaaactgtctcagctttttacaagaaatgtttaaataccaaaatgctgctcagaaaatttaaagtttaattgcccgtggttattctactgtttctatcctaatgtgtgctcctctgtactgcgtgtgtaagacgctcagttcatctgaatgtttggatgggaagttttgtgttgagcctcaggnatagcactggaccagcccagggcgcttgtggcagacgggaggggngatgggagaggcagctggttttttctgaggggggtcttggccaaacgcaggcagctggccacaaatgggcttggggggtaac

SEQ ID NO: 5327 - DNA, 335 bp, Homo sapiens
  misc_feature (1)..(335): n=a,t,g or c
tcttcccatgttgcccaggctggtctcaaactcctgggctcaagtgatccacctgcctcagcctcccaaagtgccgggattacaggcataagcacctgaacccggctgttattactatttttatttacaattaaggaaaccaaggatcggaaatgttttactttatttataaattgcccaacgtggagaatagcaaagccaggattcaaacctgggnagtctggctccaggntttacactccaaatcaccatcctatgctgcagtctattttattttatttttttagacagggtctcgctctgttgcccagggtngagtaccagtgatccctncc

SEQ ID NO: 5328 - DNA, 381 bp, Homo sapiens
ttttttttttttttcattcaacaagtgtttattgagcatctactacatgccagacactattctagaaacctgggaaaggaggggttagggtagcttggagctgtcccagctgtagctctgtctcccagaagtgaggtctgcaggggaacagggtctgggggtcctcctgcctgggagagggaaggctgagtgtataaaaaggtggaagcctctagaaatgagaaggctgggtgtgtgggactcatgctggtgccttcccagacgaaggagagggcccagaggaggcagcttcctggagcagagacggcagcaggagcgcccgtgcccggcatcacctcctcttcagcacggatatgcaggacttcttgaggggcccgatct

SEQ ID NO: 5329 - DNA, 463 bp, Homo sapiens
ttttttttttttttttttttggtggtttgaaataatctttattttgtaaacatctgtgtttaaaatagatgaaccctgctcacaattcatatatggacccgagacacagtacacgaagttcacccgtcacagggagatagtggaggctcaggagcaggtggcgtgcctggggctggatggagtctcaagacagcaggtgcagaggtggtgacgagtaaacaggccagcagaacctgcttaacagtctgggcctcaagacataccccaggccaccaaaagtttagggtgagcgtactgcaccctaaaatcccaattctccttctgctcccataccttttcccagtcatggcccttgtggatagggcctatcagtctatagaatcctgattccatgttttcccttccagaacccctagggtacagtacaaatatagtccttctttcctgaggggggctaggagag

SEQ ID NO: 5330 - DNA, 454 bp, Homo sapiens
  misc_feature (1)..(454): n=a,t,g or c
caggtggaggtgagtttaatggcggnagctcacagccctttcccctggggccaactccccacaacagagcagggctgggcagcagaagacgttaaaacccaaatcccgacagaggcacagacctgcacatgcgccacacccacacacatactcaggggactgacaggacacatgggacacagacccgccctgcctgtgncagagtcctgtccaaggcaatggcgtaggctgcgctcagttcatccgagtccctccccagctcactggtccaggccaagggatgggagaggctttgagtctagaccttgtacagcgtctgcagcagactgtggcgggcgaaggagcaggattccagggcgctgttgggcttggtcacgaacgccagcagcaggggtgcaagggccttggggaaatagtcctgctgcaccatgtggttcagcgccatcagggggcc

SEQ ID NO: 5331 - DNA, 329 bp, Homo sapiens; identical to SEQ ID NO: 2247
  misc_feature (1)..(329): n=a,t,g or c

SEQ ID NO: 5332 - DNA, 427 bp, Homo sapiens; identical to SEQ ID NO: 4464

SEQ ID NO: 5333 - DNA, 426 bp, Homo sapiens
tttgcatccagttgacaagacatttaaggtgtttatcaggatcatgccctggccccagcttcccaataccagctgttgaaaagattctctctcatctggagagaactggagtgcacagttcacccacgtggctccgggttattagttactgtgggctggtcttggtcagaggcatctgcagctggagtcacagctggacttgcagtggacgtggcagtgtctggggaggcctgggatggtcttggagggggatcgcttgctgagacagactggaaatactgcacagtccaggcgatcaatatggatagcagaaaggttcccagaaagtagatcagggctgagtgcaggatagcaccccagagaagccgcaagtgcaggtaaagccaggccaaggagcaggggctgaaggactcctcgttactgtga

SEQ ID NO: 5334 - DNA, 456 bp, Homo sapiens
ttttgggccacactgagtgaattttaatgcaggatggaagcacacagatgggtgatcaggtctctctttactgaaacacagaacatgtgccaaggtgagtccaaggacacctctgggaacaggtgaagcccctccccacacatacactccggtggatgtgagcgagggtcctgttgccacatctggggtcaggggcttggacatgctgcccttcatgggaaccttctgggtacctctcagcacagtaacgcagctgcagtctgtcggtgggggcccaggctaggggcagcaccctcttttggcatacgggacatgcctggctgcagctgatgtccgttagcctctcctgacacgcagtaaggagacctggaagtgaggcgcgtgggcgtggagttcccggtggagcttgctgcatcagcctttcttgccactctggggtcagtgaagtctttcccg

SEQ ID NO: 5335 - DNA, 386 bp, Homo sapiens
aattttaaagtgtggttttattaatgcacttcagggtaagtgccagtcttattttagcttcttctggaagaaatactaccaattataaataatcacagcaacattttcattagacaaaaactgtgtgtgtgggtgtggtaggggggtatcatttatagcatactgcaaatataaactcaattcttgagctatattaacaacactgagcaacaatatttctttctaaaattttcttttctttaaggcagatctgtttattactaacatggtgcagtgtagttttagtaaatttactattttagtttctcagtgacaataacacagatggtcagaaaacaggcaacaaaatctcttttctagttcctctacctggccaccatttaaaa

SEQ ID NO: 5336 - DNA, 240 bp, Homo sapiens
agaattcgttgtgcatttatttaaaatttatttgttcatagctatacatatattatacatgtatacctgctcacagcataaagtatttcatgacatacttgtaagagtcagtgttctatgaattcactagagaagttacagcattttgattatgatacacgaaaagaaacccaagtcatttagcttaactccttaatttcataaaccagaaaactaaaatccaagatagattgggtgact

SEQ ID NO: 5337 - DNA, 427 bp, Homo sapiens
ttttttttttgaacactcacttcaatttattgcatattttctaaatgcacctctctctctcttctgaaagagagaacatttcatcagaaaacgaacggggtcttttgcctatctgatggtctcacaccttcacaacagctacaaatccttggaccagccagggacagaccaactccagggttctctgacaacagaagtcctggaaaggctctgcactcaaaacaaacccctacaccaccccaagggagggggattgtttcaggttcggggagacgctaaaagaaattgaacctaaactcttcatcaggcatgtccagagtggctttggctctccatatagagcgaggcctgcagaccctttggctcttctttctggtggctccatctacaggttgcacctgggctgaataagcagcagctctgagag

SEQ ID NO: 5338 - DNA, 476 bp, Homo sapiens
gttgtgtttttctcagtggatcagcttatttaattgatgactgtacagttaattcatgctcaaaaatcaaacattctaagcttctttctatgaatatcttccagaccaagattattcatctcatggttttaaaggacagaatttcctggagaatgttggtcctcttgtaggtgctactgcagcaaagttgaaacaatcatacgtcagaccaaaatacaagtcagttcttcagttttcactaattaaaattaactctgtctaaataaatcaactcttaccaccttcaggattcatatctcaagtaagagacattcttactgaccaataacacaaaatatcccaccctcagcactaggatcctcagttttgaattctttcaaccatttttgtcaaaagccttgctgtagccaggtgtggtggcacattcctgtaatctcagctactcgggaggctgaggagggcagatccattgtccc

SEQ ID NO: 5339 - DNA, 428 bp, Homo sapiens; identical to SEQ ID NO: 1562

SEQ ID NO: 5340 - DNA, 193 bp, Homo sapiens; identical to SEQ ID NO: 1350

SEQ ID NO: 5341 - DNA, 421 bp, Homo sapiens
ttattttgccagtgcagaaacgtttaatagaaataaaaaggtctgcatagagccgaggccggagccacccctctgccgcacatccagtacagagaggattctataaagttcacactttttcattaagtagtagtagaaatacggtgaggccctgagactggcctggtgagcgaggaaaggccgctggggcgttccactctgcaggccggggctgaaataacccgagttccgttctcacagaaaggtgcggctgccacctcttgacacagaggccggatgggcaggtgtcctcgatggccaggccgtatcagggtacaaccgcagcagtgcaaggggcttcctcaaggacaaatggctaaaaatgtcacggtgaaaatgtcatccccaaagagttcgttctccctagacccgtgggggcaac

SEQ ID NO: 5342 - DNA, 530 bp, Homo sapiens
tttttgaggtttggttttgtttactgcgacatacacatgaaatcgagtatacagtccatgcagtagcacagccattcgagaggacatcctgatgctggctccagtgcaaaacagtcccagcaacgccgcctgcttgccatcgctgccgccgccactgacaccttcaccatggccacctagcctgacttgaagaggaggattgcaacttgacccaagtaaaaatagatgaagtgctttgtctcgtgtgtgacgtagctgccaaaatttcggcccacgatacaatgccaggtagggttatatttcttgtcaaattccttcttgatataggcagcaatgtccttctctatattgtacttctccatggcctgcgtggcgcagtcaacggcatcctgttgcatgtcctcagacatgtctgcgttcttgatcactgccttccggtcagacatggtgtgacactacagaaggagcagagaggtaaggctgacaactccttgctctgggcagtgaacattagctgctgggtgtggggt

SEQ ID NO: 5343 - DNA, 418 bp, Homo sapiens
ttttcctaaaatattttttattagaaatatagctttagtaacaaataaccatttgatagttacataaacatataacagatatgctctacatgtgtaatttaagtacattaatatgagcattctttatgggtatacatcatataaaaataaatcattttcatacttttttaaatgttggcactgtaagtcacaagaatgagctactcagtcagtctccctatttcaggaagcctttgcatggaaggacagagtctctgtgaagttctctgggaagtaaaggaggcgctgatagggactgaaggctgccttagctcagaagagctcaaggcaacagggcaatttggggagagtcacaggcacaggaagggcgtagatagaagatacgtaaaatcaaatcaggaagttttgttatattgtt

SEQ ID NO: 5344 - DNA, 257 bp, Homo sapiens
ttttttttttttttttttttttttttcagcaacctcggctgtatttattgatacaaggaagatcacccgagagtcagggacgtggcggcgaggggccctggaaatctccagataccaaagctggaagggcgtggagtcttctccagttctcctagtttacagatgttgtgacctaggcttacaatgggcctggggtctgaaagcgggacgtgggctgcgggggtcaaagagccggtttggtggaggtcagcgccaca

SEQ ID NO: 5345 - DNA, 510 bp, Homo sapiens
tccagaaatgcttttccttttatttcagaagaaaggacataaaggcagacacttcccccgcccgctccccacccctcccagctcctgcctcacccagaactggagtgaaaggccagggccaggaccagggtcccataaagcttgcccttcccccaacccttccttccctcaaagtggcaaggttagaaaaaaattaactatgttgttcctccctggcactggataaaggccccactgcagccaaggagaaagaggggggtccaggctcccctcccaggcagagaagctgccgtggctggctagggggagggtggaggtaggttatgggacagagaggacaagaagtgccctgaacaccttttccctttaacctgacatatttatatatttacagttattagggagggaaggacatctggggtgacatcagttctgcaaaggcagggaataaaagccaaatagcacccccatctgggtcacattttcctgcctcctagcttctaaaacctt

SEQ ID NO: 5346 - DNA, 392 bp, Homo sapiens
tggagcccgggaagagaagaaccaaagatgatacctggaaagcagatgacctcagaaaacatctctgggccatacagtcaggtggttccaaggaagaaagaaagcacagagagaagaagctgcgtaaggagtctgagatggaccttcctgaacataaggagccgaggtgcagggatcccgaccaggatgccaggagcagagacagggtggccgaagtccacaccgctaaggagagtcctcgtggggagagggacagagacagacagagggagaggagaagagacgcaaaagaccgggagaaagaaaagctgaaggagagacatcgagaggcagaaaagtctcacagcagaggaaaggacagggagaaagaaaaagacagaagggcccggaag

SEQ ID NO: 5347 - DNA, 394 bp, Homo sapiens
ttttattttctttgttatacgtctatttattaatgaaaaagtatcaccaacatccatttaaaaataagcaaaagacattaataaacattcttccaaagaggatatacaggtggcaactagatacaagatgttcaaatgttcaataccataaaataccagaaaaatgcaataaaatcacagacagatgctattatacagctattaaaacaactaaaattaaaaagactaaccataccaagtatggcaagaatgtagagaaataagaaggttcacatactgttgatgagaatgcaaatggtacagttaggttatagtctggccttgtctttaaaagtgacgcattcacgtacactgtactactgacccaggagaaataaagcatttctgcatatta

SEQ ID NO: 5348 - DNA, 340 bp, Homo sapiens
ttttgcagcttccactctttatttccaaagaatcagtgtcacacatgcagatcacaaagcgggtctccctgtgctgcttccttctgtgttttctagtctctcccccaggggctgcccagggccctcaggaactgagtgtgggcaagacactgctgggccagagggcacgacgcccacgtgggcccgtattgcccaggccatttggcagtgcagagcccccccagcctccagcaggagccccctggcatgagctctcccctcaggggtcctgagcaacgtccctgccagggctggtgggtggcagcgggggggcagacacctcgctgaggtcctgcagcag

SEQ ID NO: 5349 - DNA, 418 bp, Homo sapiens
acaaagcagcaccttgttttactgagggtagaaaataggaagtccgctccctgcctcacccctcttaagcatcaaagctcagacgtcagcgggacttgaagagtctcagcctgggcagtgcagtcacaacacctgggtttccagccgccggagttccttgaccacaagatcaatgttaataattgggttaaagtacagggcccagtaaaacaaacagttgcaaacaaactgagggatgaggggccagaacatggccacaaaaagcccctgcgttgatactttccagaaatggctccacatcctctgaggcacggtcttcagttcacttctcgaccagattctccaaaaggagaataattccagaactgagagtaacatagcattgatgatgagaaaccgtgatgtccagtaatggacc

SEQ ID NO: 5350 - DNA, 453 bp, Homo sapiens
tttaaaaatatcttaacacctttacttagatctcatctcatacttgtagcatttcttcaaatttactttgaaaaaagagcttcactgtgtgtggttgtcatacacattcttctacccaaccatggacctctttcttcctctcaggcgcacttcatctaatttttttagcactggcctggcctttttggaggaggtggagtagctcttcagaaaggcttcaaacacagtttcagtgttgggatgggtactgaggaaggccttctccaggacatagaggtctactcccttatcctctggaagtgctgaaatgaaactcagcccaaagtctatgagcacaatgttcagctgttccagggggggtttcaggagcatgttggaggtggtgagatcaccatgaatgaggtcttcatcgtgcattcgagccaaaacctgcccaattgtcttggctaagtt

SEQ ID NO: 5351 - DNA, 411 bp, Homo sapiens; identical to SEQ ID NO: 1578

SEQ ID NO: 5352 - DNA, 269 bp, Homo sapiens; identical to SEQ ID NO: 1579

SEQ ID NO: 5353 - DNA, 174 bp, Homo sapiens
ttttttttttttttttttttttttttcaccatttgggacgtctttattatggatccgtccactcttccaggagcagtagcccttctaagaaaggggtgggaagaaaaccagcctacccttcaagctgacttaggatgcaatggtacagacaccagccttgggggagggttctcc

SEQ ID NO: 5354 - DNA, 296 bp, Homo sapiens
  misc_feature (1)..(296): n=a,t,g or c
gatcagcagccgagaaaagtacatcaacaatcagcttgagaatttggttcaagaatatcgtgcagctcaagcccagctgagtgaggcaaagnagcgataccagcagggaaatggaggngtgacggaaagaaccagactcctctctgaggttnnggaagaattagaaaaggtaaaacaagaaatggaagaaaagggcagcagcatgactgatggtgctcctttggtgaagattaancnnngcttnncanaactgaagcaagaanctgtagngatggacattaganttggcattgtgg

SEQ ID NO: 5355 - DNA, 409 bp, Homo sapiens
  misc_feature (1)..(409): n=a,t,g or c
cagcaactggtnactgtttatagaaatggggaaaggggaaattaatatttgtttaaaatgctttgagttgcctgatagacatccaaggggagcagtcagtttctaagcaaaagactgcgcttttgtggacagtcctgtggcagaggattggaatttgggagccattggcatgtaggtggcatttaaattatgtgactaggtgaggagggaagggttgttacctagggagtggacattgatggagaagactagtgactaagttctgaggcaagaccctccagcgtgtagatggcaagcagagcaggaagccatttatgactgaggaaggagaccactgatggccaggggagcngaaaccnggggccatgtaattgtcaccaaaattaaggtagcatgcatngggttttnt

SEQ ID NO: 5356 - DNA, 332 bp, Homo sapiens
tttttgcacaatacttacgatttaaaaaaattacatgatggcttctttttcatcatttaagaagtgaacaaaaagtactggtcaacttttaaaatatgagtggtatgaacacaatgcaggaaagagactaaagttgaagaatttcttttcatcaggccacccaagtattgcaaaccagaaaaaaattttaatataaactgttgcaatccttacatctttatgcaatttatttggaaaagtcaaataattccattacaaatatatttgttaaaaaccttataaatttaacttataaattccaaattagtcaattatattatttcagagtctga

SEQ ID NO: 5357 - DNA, 395 bp, Homo sapiens; identical to SEQ ID NO: 990
  misc_feature (1)..(395): n=a,t,g or c

SEQ ID NO: 5358 - DNA, 271 bp, Homo sapiens
  misc_feature (1)..(271): n=a,t,g or c
aatacacttctttgttataccacgaccaaattttctaatcctagtacaggccacaatgaaataggccaaacatgctaccattaaagtttgttgggatgagattgtagtaagtttactcaaagtattcaagttctaatttttaaggtgctgtagagaaacataaaagatttcactgtatcnaaaaatatgactgttttgatcttaagctatacattttatttttatctaactgattaagacctggcctcttaatgaggcacatttttgggca

SEQ ID NO: 5359 - DNA, 472 bp, Homo sapiens; identical to SEQ ID NO: 175
  misc_feature (1)..(472): n=a,t,g or c

SEQ ID NO: 5360 - DNA, 501 bp, Homo sapiens
  misc_feature (1)..(501): n=a,t,g or c
gactttgtttaacctataaccttttttcctcccacatagtaggtagtaacatcacacggaaacagtgctctgaagacattctggacacatcgtatacagcacagccattcaaatcaacggcaacagaacgcacgaagaacctggttttctttcaaagcatgagcagttctcattttacaacatgtgttttaacataattcagaaagtgcaatctttgcatgacaaccagataattctcaaaggttactagtgagctgataaaattaacgtttggcaaggaggtcatggtttacaggtaggctgtccgctcaccaatgctcagaaaaattcagcagaacatacttttcatatttagatccgaagagaggtgagagacattctactcaaagtcatgggctgggctttctgtcctccaaacgaaattgggcaggncatttgcgtggtttcctctgggataaagttccccttatttaatcantggtgcaaaaaatcctnggcatt

SEQ ID NO: 5361 - DNA, 430 bp, Homo sapiens
ttaaggttcttatccagctcttttatttcacagatgggaaaataaggcactgtccaagtaacacacagtgacagtggcaaagtcgtgcttgcttcccaggtccctgacctcagacaagggtgttctctcccattaaatgcttttttctcctcatcttgctccattttcctatcttgtggcaagagattaacaatctaaattccaatcctagttctgacactgaccaatgaaataaacatttaggctgggtgtggtggctcacacctgtaatcccatcaaggcaggaggatcacttgaggccaggagttcaacactagtgtgggctacaaagcaagacccccgtctctacagaaaattttgggtgctgtgtacctatagtcccagctactctgtaggcggaagtgggaggatcgtttgagcccaggagttg

SEQ ID NO: 5362 - DNA, 545 bp, Homo sapiens
  misc_feature (1)..(545): n=a,t,g or c
cagttcagcaaatgtttattgggcacctacaataggcaaggcacagtaccagctgctgtgggttacaaagacaagaaggctaggctcaccctcgagaggcttacagtctaatagagagagacacactcacaggtaacaaaaatacaaggcaaaatgaggtgagctctatggcagaggcaaaaacaacgggagaacagcgagcagagatagatcagacatatctcagcagatcagatgttggatgcagggagtgacgtttcagccaggctctgggaggtgggtcggattcgcacaggtgaactggaaaaaagaggacactaaggcacaggcaaggtatagaggtgggaaagtgcaatgaatgttcagagaacagagatgcctgccttgaccaatacataggaggccaacaggataacagagggacctaagctggggaagtggtttcaggccagatggtgtgatcgctcgtagtaggatttcnttccttccttccttccttcctttttttccaatgaaacaagccttgatctacccccaggctggag

SEQ ID NO: 5363 - DNA, 306 bp, Homo sapiens
aactttactcataaaattttatttgaacaaaacaatttttgaaaatataaaaatttcataagaactgctttcctgttagatacaaaatttattttaaaaataaataattatattgacctttaccatcacttgtctaaattttactcatgtttattgtcgaagacacagaggtgaattagaagagtatatcattatacattgtcaaataaagcgaaggtttccttatccaaatagagagaatatatatgtgattacttaatataaagcaaaagctatttctaccaaagaacagacatgcagttattg

SEQ ID NO: 5364 - DNA, 164 bp, Homo sapiens
gcattattttaagatctttattattaagtaactcactggggttgtcaaagtatgttataaaattacacagataattagagatatatgttacatagaaatgctgattttacactctcttctgagtacaagcatttgattacagaggctcatagcacaacaaaatg

SEQ ID NO: 5365 - DNA, 410 bp, Homo sapiens
taatttgtataatttattagaagcttcttaggaactatatttaagccaaatatctacataagttacaacagaaaaagactgacgccgcaaataccaaactgccaaataatatacacagatttgtcaatgcccataaaaaatgtgaagggctggggactgggagtggtttttctttttacaacaaaatgtacagattactaaaaactaggcatttagtccaacttttgacagcgttttacagctacaagttcacattaaacaaactatttcgcggagggcggtcgcgctgagcctaggcggccagagggtgcggggaaggggcacttcctttgtgtcagtgacaagtgggttatgttgaagactctttcctctccccagctcccggcctcccttcaaaaaaaaaaaaaaaa

SEQ ID NO: 5366 - DNA, 270 bp, Homo sapiens
  misc_feature (1)..(270): n=a,t,g or c
cacggctcctgttttattgccttcgggtgtccggagcacctgactgccccggggtctaataatttaaggtgccgagaacaggtcaggacaaggggtcgcaaaanaggggctgggggcagntggttacaaaatatacccccaccccacaacaaacaggctagaggagaccagcctggctgtgtcggganggggcgggcagagggcgcccgaccagccttcagagagacagagccacggccagcgccccagagggagtggcggagacaggac

SEQ ID NO: 5367 - DNA, 322 bp, Homo sapiens; identical to SEQ ID NO: 2640
  misc_feature (1)..(322): n=a,t,g or c

SEQ ID NO: 5368 - DNA, 330 bp, Homo sapiens
  misc_feature (1)..(330): n=a,t,g or c
accacgggacnttttttaagtttattctagggtgagtgggtgcccaaggggggcagttgagtatggccgaggtcacctggtggcagggtgctcagggatggccacaggttctatagggccctgcagctgnaantctctagtcagttgggatgcttcaccttctgccccaccccaaggggtttgggcaatncatggatgtagtagttttcgtaattcgcagggatcagtgatgggcactgagcaggcttgattctcacacacatatgcagtggcctgggtcttccaaccgtcggagggtactcaggaaaggcancttgccggacaagaagc

SEQ ID NO: 5369 - DNA, 424 bp, Homo sapiens
  misc_feature (1)..(424): n=a,t,g or c
ttttttttttgcagtttaaaacttatacattgtttatttctggtaattttctgtttaatattttgggacctcagttgaccatgagtaacacaaaccacagaatgcgaaacagtggataagagagggactactgtacatactttcgcctaagacagttctgtatattcttctgttaacggggtagcaaaagcatatagaaaggttttggggggatgcagtgcattgctcttctgtaatgacagtaatttacttcaagacattgcaggagaaggggttaaaggagtaaaggggaggaagagaaggattcatttcatgcctacctgtacagagacactttcttgctttctacttttttttttttttttttttttgagncggattctcactctgtgcccgggctgggagtgcagtggccanttctcgt

SEQ ID NO: 5370 - DNA, 356 bp, Homo sapiens
ttttttttttttttttttagctcagccagttagttgttttattttgagttttgtttttttaaaaaaagaaaagctttgagaaaatgtattaaatatcagtaaagggcaggaacacacatggctagctttacaatagcaatctaaacatacacaaaggcaaacattgagtaaaatgctagggaaagacggcactttgggggcctactgcagttttccttattgcacataaaggttgtggataacgccaagtctttaatttttcacagttatactttaatgtcattttatataacgtttatttatataacatactataatgttaattttataaaaccaccagtttgctactgttgaat

SEQ ID NO: 5371 - DNA, 285 bp, Homo sapiens
  misc_feature (1)..(285): n=a,t,g or c
gtttttcaacgttttatttcaagcattaaaaaaaaagaaaaaatcaattaccttcaatagaacagaaaatctgaaaaattaaataaggctaggcatggtagcagatggaaaggatttactatcctgtatgattttaatgacaatgnccctgccaaataatatcaccccgtgggttaagggggtacacaggaaggcagaagttgaaattagtttgaaggctacattgtttttttcccaatttacattgcttaaggatcagcaacgggaaggaacatcaatgccccc

SEQ ID NO: 5372 - DNA, 257 bp, Homo sapiens
  misc_feature (1)..(257): n=a,t,g or c
attttaaagttttattatgaaaacacatggaattaacggtgttatccatgtatttgcaacagcagagaaagagtgagagtggaccatccccataggggacacttatcctttggctaaactaatataaataatggaaataacacctaatacaataatacagcacataaaagagattacattaagagangagacaggaactgcggagaggagtcctgagtatggnggagatgcggctcatggagaagcatccaggctca

SEQ ID NO: 5373 - DNA, 129 bp, Homo sapiens
  misc_feature (1)..(129): n=a,t,g or c
ttnacagttaacatttattaaaacatgtcatacaaaagggcatgatctcttctataagaagaaaatattaaacattaacattcaattaagtaaaaccatgctgtacactgaagacagcaatatataaag

SEQ ID NO: 5374 - DNA, 412 bp, Homo sapiens; identical to SEQ ID NO: 286
  misc_feature (1)..(412): n=a,t,g or c

SEQ ID NO: 5375 - DNA, 211 bp, Homo sapiens; identical to SEQ ID NO: 1909

SEQ ID NO: 5376 - DNA, 247 bp, Homo sapiens
cctggttcgtaaaactcatttattcaacaaagcagtacaagcctccccttcaatcaggacctgcctgcagggtcgggctacttcagtgtcttcagccaatgggagctagagggtttaatactttagtccacttcccttcatctctggccccatcgacaacatggggaaggggagtgagggcctggtagaagggtactaaggccccttatttcgttcgctggtagaactggaagactgctttctcctg

SEQ ID NO: 5377 - DNA, 414 bp, Homo sapiens
aaatataagtaacagtttattaatttttttttttacagtgagatatggctatgggaagcaggtgatactatttgtttaagaaactgggatgccaactaacacgtggagttccccaagactttgcaatctccatttgtgagtttctgtaaaaaagggaacccagctagaggattcacagagaccttgaatgacaagcgacatactcgaaatctgcagctctcctcccggagcccagcgtgccaggagacacgctgcagtaaggcacttaccaagctcctttggatagagggaaagaagaaatcaatccaggcaacatgcaagtttcagtgaagtcagacattttatgggaatttaaagtcttgcctgttctcagtgcaccccagtcagttactgacatgtcagcctcagaaaccg

SEQ ID NO: 5378 - DNA, 395 bp, Homo sapiens
aatgtacaccagaagtcaatatttaataacagtaagaattttttttgttacccttaagtgtaagttcccttccctctacataacttaagttaattttggagctaagcgaacttggtcacccactaataaggggcaagccaggaccctacggagcacagagccaagctctcaacaacacctggtaactctgtgctattcctagaatcactgctgggtgccccgcaccatgaccagggaatgggacatccacagtcctcaacattcttccaaatcccagggcagcagggaagccatcccaatcccaaccttttccatctgcttctccagggagtccagggggtaggcccgggacagcagctgcttcaggcggcccagctcccgctccttctcctcac

SEQ ID NO: 5379 - DNA, 470 bp, Homo sapiens
tggaaatcagaggtgaatatttatttaattcatatataaattttacataatattcatggtgctataaatataggcacattttttaaaagtccagatacatccaaaaattaccccctcactgtagcctactccaatcccctcaagacggaatatctaacagtgtttggaaaacagggtccagaaaggccctgcccattaattttaaaactttctgaccatcaagaccattctttcctgcttcaaccaagcagagtcaacaaggatcatgtgttttcagggttttaattgcactagttgatgaattaagtaaatgcctctgcctgggtagtttgtaataggtttatgggtttggtttctcctacttagttcaagtcagagaaagaaaaaccaatatctatattcctattggccttctttaaatccctatgagatggcttaaaaggatgtcactgcaccagaggactcacttg

SEQ ID NO: 5380 - DNA, 553 bp, Homo sapiens
  misc_feature (1)..(553): n=a,t,g or c
agaactgnannttttattcanacatttnctttgattnaaatacattacgtacanngtctacattggattagaagaatgacacagggggcagcaacactctcgcatcccagcctccantccctgacnctgngangcagggccgatcggtgggnannggnnnngtngttccatgagttcgnntcagaancctagncccggcattctgggcccctggctcttccagagtccacattcaaggcaacctgagcacaggcttgagggagagtggagaaaggccaggaaaggatgcccacactcttgcctgccaggcccaggaccagctctctcctacactnggacccaatttccttctggatcacagagctggtctggatcaagacaatgtggagatctggtgtggaggctgtggcaggtgangcagccgggctccctggttagacccccaggctctctttagcacnagatgggcactttaccaacaggtttgggtaaaaatgtctacngagagctatgcacaacctgggtncccttctgggctcctaaaagtcaaggg

SEQ ID NO: 5381 - DNA, 476 bp, Homo sapiens
  misc_feature (1)..(476): n=a,t,g or c
agtattttcataatttatattgcttaaaattatgatttgcatgctaagatgcaaacttacgtgatatcttctttagacataatgctattaagagcacatgctttataaaataaaactggtctcattcatatcaggtgcagaaagccagtcctgaaagcatagactatcccttattctggctgttattaaggaaaaaattcatttaaaaaatacagtaaagattgaaaccaagtttactgtttcttgaacagaataggaagaaaatattttaaatggctgagctggtcattagactattactcatttatcttaaaggcagaaacttgtcaacccaactacgtgaaacagagaagcatgatttgcttaagcaggcgacattagagttaggcctctccacngggagcttccccgaccgtcagcacgtggcagacagggatgcggcccatcattccgcagggaagaaccggccgggccgg

SEQ ID NO: 5382 - DNA, 562 bp, Homo sapiens
  misc_feature (1)..(562): n=a,t,g or c
tagaagaaaagagaagttactttattacaatttgttatctcatcccgaggtcagggccccttgcttagtgggaaaaaaaaccctttaggactgagtctcggaacagcacctgtcctaaacccaacttctctgtgatgcccggatttcttgattttgatccagtagctgctcattttcctgccttttacatttaggagattcaagctctgtcatttcctctagctgcccctgaagtccgtccttcctgcagggcccaactccacgtagagtgagtgcagccacacagcagtaaccagatagagcagcctcccctgcagacatgagcaaagaagggatccagagagccaaggctgtatcatagattcttgtggggtcaaaggggcagtcagtatgtcccggcccctcatccagtggtaccagaggatccagcagtcctggggtggcagtcagcaataaggcggcggccaccgttgggccacagtgagtgacacagcaagaaggaggcccagggagcaggcnacggacaagagcaggntcaccagagctagtgccagcaggaccc

SEQ ID NO: 5383 - DNA, 580 bp, Homo sapiens; identical to SEQ ID NO: 2660
  misc_feature (1)..(580): n=a,t,g or c

SEQ ID NO: 5384 - DNA, 268 bp, Homo sapiens
  misc_feature (1)..(268): n=a,t,g or c
catctaatggctggttatttttacagatgccaagtttacaaaacatacaagtgcacagacaggtgtgggaggtagctcgaaatatacagagtgttcgcaacactagagacgtcttctggccgccatcaggggactcggaggtagggtaggcttggtgaggcccgtgnttcgtgtccgtggcacagcctcctgcaaaggggctgccctgctcccctgttcacatggtgccaggccgtgctccccaggtgcctccgggggtgctgaagaa

SEQ ID NO: 5385 - DNA, 567 bp, Homo sapiens
tgtatgttgagagtctctttaatttttagagtaaatatgacacaatggatagctttagaacaagctaacattactacagttcaagcatgtgcaactggtacagttcagtagtacataaacgactcaaacaaatgtacgacaggtcagaaacttaagttacaaaatagagtcaatattacaattaacacagagaagtaaaaaccattgctctcagattctgcacacttaaaaaaacataaactttatacagtcattgaaattacgcatttctactcagattattagagcatattacaaacacacagaagcctaaacagttatggtcacattttggttttgttccagtggtgcacgatcacatgaaatgttacatccgttttgtgtgaaataaacatttggctgaagtgcaatagctgctgcattaaaaatatttccataaaaatgcttagattaaaatcttcctgaacattagggttctaatgttcaggattattttaagagtccttatgaagagtccttaaaattatagaaatagatgtagttaggaatttcagtgtgtttgctgtt

SEQ ID NO: 5386 - DNA, 433 bp, Homo sapiens
tcttactagtgctgatttattacaaaggatattttaaaggacacaaatgatgaagccagttgaagagatacacagggtgaggtttggaagggtccttgtggagttggggtgcaccactctcctggaacatggatgtgttcgccaacccggaagctctccaagtcctgtctttcaaggagttttctggaggctttatcacgtaggcatgattgagctccagctctactccccacgccagaggatggggaatggggctgacagcacaacgcttccaaccataggtctttttggtgaccagtccccaaataaggagcccaccaagagtcacctcatgagaacaaaggacgcttctatcacccagaaaattccaagggatttaggagctctgtgtcaggaaccaggtttaaggaccaaatgttagaacaaaagatgt

SEQ ID NO: 5387 - DNA, 394 bp, Homo sapiens
cggagagacaaaacaagaactagagttttaatgataataaaagcaataataataaaagcaataacaataaaaacaagatcagactctcactggggtaggcaagggactgaggaggtgaaacaacccgtatggtgtcccagcacggcacctgctaaggagggagggtgggaaagcccaggccttcgttgcgggtacaggaggatgcaggagagggctgaggtgggggaggaacaactggtgtactgggagagagatttgggacgagggggaaccatcagcaaaaaatgaagccaggaatcacagtaagggcgcaagggctgaggccagttgtttccataaagaagactcaatcattacaaaaataatttttagtagttaaaaaacacacataggg

SEQ ID NO: 5388 - DNA, 527 bp, Homo sapiens
tttttgtagggatggggtttcactgtgttgcccaggctggtcttgaactcctggacacaagcaattctcctactttggccttccgaggtgctgggattacaggtgtgagcaccatgctcgacctaaatgttcacttttaatcagggcctatagccttgaattctatagtaatgtggttcactaagtcctccctaatagatattttcacactttctaaatggaggtaggactgagggactgtactaaatagcagacaagcaagaagagcagccttcccctaccaatacctccagcaacagtccctagtaacaacagtagtaacaggtttttgttttgttgttgttttttaagagaggcagcagtgtgttcataatcctaatgaagaaaaatggattgggttgcagggaactgaggcatgagacaaagcaagaggcagggattaaagaaatccacagggctttctgctttaatccaacaaaatcacaggaaaattactcaattatgaatttggagtcagggatctctgc

SEQ ID NO: 5389 - DNA, 139 bp, Homo sapiens
tttgtgttatctctctttattgttctgcagcctctttaaaaactttgccatgagatcatttccacaataaaatacatttcttccataaagccatgtgtttatttagtcaactattgtttgtgaggacagctttgctgta

SEQ ID NO: 5390 - DNA, 384 bp, Homo sapiens; identical to SEQ ID NO: 4112

SEQ ID NO: 5391 - DNA, 403 bp, Homo sapiens
cgttaaaaggcaagtacatatattttatgtgttcaagtacatatatttatgtatatttatgtatgtatctgtgtatgtatccacatgcagaaagataatataccctgatacaaaatatacatgttaagtctaagaagtcctgttactcaaagaaatattttcaaatattattagataattcacttgtcgatcatcctttttcagcatctaaagaaatttcagacacaaaatatgcaactgcatttagaataaacagatggaaaagctattgtagaaaaaaatataggtttttagaaaagttggaaagattacaggcaaaaaataagaacatatattaaattacatttgcaagtttcaaatatttgtaactcaacacaaaaacctctaaaagtatgttgggtgc

SEQ ID NO: 5392 - DNA, 283 bp, Homo sapiens
cagctggagcgtatgactttattgatccaggacatgtatttgcagatctgggtgtagacagctggatgctgggcagagcacaggggtaaacaccccacgagaggatgccttggagggtctcgtcacagaccagggggcctccagagtcactctggcaagggtcctggccccggtccagtccagcacatatcatgttgttggtgaccacgccagggtagaagacctcacactctttagggctcaggatagtgatgctggagcaggtcaggcccttgtggaactt

SEQ ID NO: 5393 - DNA, 524 bp, Homo sapiens
  misc_feature (1)..(524): n=a,t,g or c
aagacctttaataatgcccacgtgccctaaggttggccctcttaactccctcagctctttctggctttaagcatcaccccaggtgtgcagtttatgtcagagggggccatcaggtagggaaacttatcagctgctctaagagaaaaggccgtccctgctattatcagtgggcacaggctggagctcagccagcaggggctacagtcgggttacctggagacatgatcccctggtcctctgagggcctaggcaggacatgggggaggacacggtnccccgggacagagtctctggccagggagcagcctttcaggttgctcttgtgtgctagaaaaaaatattttctctatgtgccatgtcatgganaaagncaaaagcactgagttaatggggatcttggaagcttttagccacaggttcttctgcctgtgaagagagcttttttgcatgttgaacanctggnagcaggaggttgaattggcagtctttttccagnggccacancttcanccagtcacntttcc

SEQ ID NO: 5394 - DNA, 488 bp, Homo sapiens; identical to SEQ ID NO: 457
  misc_feature (1)..(488): n=a,t,g or c

SEQ ID NO: 5395 - DNA, 415 bp, Homo sapiens
aaatatgctctgaattttatttacagaagtataccttacataattattagaggctataaatagcttaaaataagtttccttgactctgaaaaacaaaataaggatcagcaacattttaagcaaaaaggttaaaaagtccattttgttaactcttgttttgcttgatattcatgaatattttagctcttcatgagtcctgtacatttttcctttattccaatgtcataatctccaaagttatcagaaacttgcatttgagagcatgtgtcaaagtcctatagctgattataaaccatcctttaaagaggattaaaacaagaccgatttttgaatggtgaaatgtccaaggtagttagtcaagaacatgactgacaaattttattaatttctgtgttttacaataacttaacataat

SEQ ID NO: 5396 - DNA, 546 bp, Homo sapiens
  misc_feature (1)..(546): n=a,t,g or c
anntatttttgcaaaagaagaaaagtttttttganctccttgaatgtagcacacaaaaaaagtgatggttcccccaggctccatcagcaatagtaaagggcaggaacgtagagatttctttttccaggcccaggcctgtgaaaaacgatggctaagtnttagtccttagcagggccgacggatggtctccattcctggntaaccctctggaatctgggagcatgagtatctccaaganttcatttctattcagtaaagatggggaggggantcccactgttacttgttgaactggaaagattagaccccatgctctgagggtgcgtccactgccacttggttctgttgggccgctgctctcctcgactgaaacactgggaagaagggcacaggggttttactgggagatgtaagctccttngcatagcttgcagcccttcggcatataacgtgcccgtngctgctgaggggagagatgggcccagtttgctgggtaaggggtcccatcatgggagggcaggctnggaaagaaatggggtnggccca

SEQ ID NO: 5397 - DNA, 1201 bp, Homo sapiens; identical to SEQ ID NO: 409

SEQ ID NO: 5398 - DNA, 760 bp, Homo sapiens
agagccggcgccgtcaccgcccgcattgccgctcccagtcccgcgctcggcacgacatgaaatcccccgacgaggtgctacgcgagggcgagttggagaagcgcagcgacagcctcttccagctatggaagaagaagcgcggggtgctcacctccgaccgcctgagcctgttccccgccagcccccgcgcgcgccccaaggagctgcgcttccactccatcctcaaggtggactgcgtggagcgcacgggcaagtacgtgtacttcaccatcgtcaccaccgaccacaaggagatcgacttccgctgcgcgggcgagagctgctggaacgcggccatcgcgctggcgctcatcgatttccagaaccgccgcgccctgcaggactttcgcagccgccaggaacgcaccgcacccgccgcacccgccgaggacgccgtggctgccgcggccgccgcaccctccgagccctcggagccctccaggccatccccgcagcccaaaccccgcacgccatgagcccgccgcgggccatacgctggacgagtcggaccgaggctaggacgtggccggcgctctccagccctgcagcagaagaacttcccgtgcgcgcggatcctcgctccgttgcacgggcgccttaagttattggactatctaatatctatgtatttatttcgctggttctttgtagtcacatattttatagtcttaatatcttgtttttgcatcactgtgcccattgcaaataaatcacttggcca

SEQ ID NO: 5399 - DNA, 1866 bp, Homo sapiens
gaaaagacaattcttttaatcagagttagtaatgtggacagtacaaaatcgagagagtctggggcttctctctttccctgtgatgattaccatggtctgttgtgcacacagcaccaatgaacccagcaacatgccatacgtgaaagagacagtggacagattgctcaaaggatatgacattcgcttgcggccggacttcggagggccccccgtcgacgttgggatgcggatcgatgtcgccagcatagacatggtctccgaagtgaatatggattatacactcaccatgtatttccagcagtcttggaaagacaaaaggctttcttattctggaatcccactgaacctcaccctagacaatagggtagctgaccaactctgggtaccagacacctactttctgaatgacaagaaatcatttgtgcatggggtcacagtgaaaaatcgaatgattcgactgcatcctgatggaacagttctctatggactccgaatcacaaccacagctgcatgtatgatggatcttcgaagatatccactggatgagcagaactgcaccctggagatcgaaagttatggctataccactgatgacattgaattttactggaatggaggagaaggggcagtcactggtgttaataaaatcgaacttcctcaattttcaattgttgactacaagatggtgtctaagaaggtggagttcacaacaggagcgtatccacgactgtcactaagttttcgtctaaagagaaacattggttacttcattttgcaaacctacatgccttctacactgattacaattctgtcctgggtgtctttttggatcaactatgatgcatctgcagccagagtcgcactaggaatcacgacggtgcttacaatgacaaccatcagcacccacctcagggagaccctgccaaagatcccttatgtcaaagcgattgatatttatctgatgggttgctttgtgtttgtgttcctggctctgctggagtatgcctttgtaaattacatcttctttgggaaaggccctcagaaaaagggagctagcaaacaagaccagagtgccaatgagaagaataaactggagatgaataaagtccaggtcgacgcccacggtaacattctcctcagcaccctggaaatccggaatgagacgagtggctcggaagtgctcacgagcgtgagcgaccccaaggccaccatgtactcctatgacagcgccagcatccagtaccgcaagcccctgagcagccgcgaggcctacgggcgcgccctggaccggcacggggtacccagcaaggggcgcatccgcaggcgtgcctcccagctcaaagtcaagatccccgacttgactgatgtgaattccatagacaagtggtcccgaatgtttttccccatcaccttttctctttttaatgtcgtctattggctttactatgtacactgaggtctgttctaatggttccatttagactactttcctcttctattgttttttaaccttacaggtccccaacagcgatactgctgtttctcgaggtaagagattcagccatccaattggttttaggtcttgcatatcagttttattactgcaccatgtttacttcaaaaagacaaaacaaaaaaaaaattatttttccagtctaccgtggtccaggttatcagctctttaagagctctattaattgccatgtttacaaacaaacacaaagagagaagttagacaggtagatctttagcagtcttttctagtttccctggatttcactgatttattttttagggaaaatgaaaagaggaccttgctgtccgcctgcactgcttcctggtaaactataacaaacttatgctgcc

SEQ ID NO: 5400 - DNA, 1488 bp, Homo sapiens; identical to SEQ ID NO: 1209

SEQ ID NO: 5401 - DNA, 10476 bp, Homo sapiens
ggatcctccctcctcggcctcccaaagtgccaggattacaggagtgagccaccacacccagccccatctcttttcatcatggtactaattcctgcccgtccacccacaaaagcactgtagtcgttcccgagtatagaggcctgtgagcctccactagggagagggctcctgcagagatcagataaattgatcacaatggctggggtggtggcaatgtgctaatgctctctttcttccactcaagatatcctctgtctccctcagcctgtgagctttttctccagtgtgctctgccagtgggggccctgcctgagagcccctgcagctgcagaggacagtttctttctgctgaaccatcgcagctatgccccagcccctaccctggaggggtccccaggggccatgggcagcacctcctgtatagggctgtctgggagccactccagggccacagaaatcttgtctctgactcagggtattttgttttctgttttgtgtaaatgctcttctgactaatgcaaaccatgtgtccatagaaccagaagatttttccaggggaaaaggtaaggaggtggtgagagtgtcctgggtctgcccttccagggcttgccctgggttaagagccaggcaggaagctctcaagagcattgctcaagagtagagggggcctgggaggcccagggaggggatgggaggggaacacccaggctgcccccaaccagatgccctccaccctcctcaacctccctcccacggcctggagaggtgggaccaggtatggaggcttgagagcccctggttggaggaagccacaagtccaggaacatgggagtctgggcagggggcaaaggaggcaggaacaggccatcagccaggacaggtggtaaggcaggcaggagtgttcctgctgggaaaaggtgggatcaagcacctggagggctcttcagagcaaagacaaacactgaggtcgctgccactcctacagagcccccacgccccgcccagctataaggggccatgccccaagcagggtacccaggctgcagaggtgccatggctgagtcacacctgctgcagtggctgctgctgctgctgcccacgctctgtggcccaggcactggtgagtctcccccagcctcccctctcctaggcagctccaccactcactgagcactgctttgtgctaggcattaacccaagtctgtcctcattttaaagacaaggcagctggggttcagagagggttcagagcttatccaaggtcacacagctggcgggtccaggagcaggtggaacccagagctgtctgacgtccacatgtttaatggcctcacactcccagcaaaactgggtctagagggtgggtgaaatcatgatgccaggtgtgtagcctggatcctgattaaggttgctctggccccaaaccacagctgcctggaccacctcatccttggcctgtgcccagggccctgagttctggtgccaaagcctggagcaagcattgcagtgcagagccctagggcattgcctacaggaagtctggggacatgtgggagccgtgagtaccaccaaggatgcatggcaactgggggtctgaaatgaagggtgctgggtgggctctggatgggcaggaggagagtggagcccccataggggatggatgagatgaaatgggatgagatgaaatgagataggataaaatggaatgggatggatgcgatgggatacgatgacatagaatagatggagtcggatgaatgggatgggatgggatggatgggaggggaagggataggataggatgacatagaataaagatggatgggatgggatgggatgggatgggatgacacagaataaagatggatggattgggatggatgaatagaagagatggatgggataaattgatatggatgagatgggacaagttgggctggtgggcagctgcatgtgccttggagtgctctgttggcctcttcctaagagaacctccccattggagctgggagcctcccccactcatgtgtcctccaccttggggcccctccctccccaggatgacctatgccaagagtgtgaggacatcgtccacatccttaacaagatggccaaggaggccattttccaggtaatgatgcccagatcctggatgaaggttggggcccaagagatgagggacagagcagggaagagctgagccccctaaaggggccatttccaggctgaggaggaggcctgggtgcctgggaagtcccagctcctcctggctgggagcaggtcatggccctgagctcaatagcacagccagagatggtcttccctgaggggaagggcccctacatgtgcccaactacttaactccttggcactcgtgaactccagcaccctgggggattaggggtcagtctgccctggtggggccttgtgtccagggacttgggcggggtagacctcagagaggcccagctgacggccccctctggcctcccaggacacgatgaggaagttcctggagcaggagtgcaacgtcctccccttgaagctgctcatgccccagtgcaaccaagtgcttgacgactacttccccctggtcatcgactacttccagaaccagattgtgagggctgcaagctcacctcctgcctgcctccccacgcaggcccctgtgcccacccatgggggagccacacacacagcaccccagccagccagacacacacacacacacacacacacacagcacccaagccggccagacacaaacacacagcaccccagccagccggacacacacacacacacacacacacaacaccccagctggccggacacacacacacacagtaccccagctggccggacacacacacacacagcaccctatccagacacatacacacacacagtaccccagccagctggaaacacacacacacacagcactccatccagacacatacccacacagtaccccagccagccagacacacacacacacacacacacacacacacacacagagcacacacacagcaccccagctggccacacacacacacacacacaccctgtccacaaagggcctaggaaactacgtgcccttcagccatgcacccgaccatgggcccccaggttcaggtgcacacggtgggcctgtacgctcacacacccttacaccctcactctcacacacatgcttacacacttattcattctcacatatatgctcatgctcattcacacacaatcccgggccacctgccctaaagtccccacacagccctatctttgccttttgtccccccacatagagttctaaaccacagcacccccactaggcctgcttcctcccattccagtggtccctgagcccttgggccggcctgaataggggtgggcttccctcccagaccctaacactcccaccctgtgctgtgccccaggactcaaacggcatctgtatgcacctgggcctgtgcaaatcccggcagccagagccagagcaggagccagggatgtcagaccccctgcccaaacctctgcgggaccctctgccagaccctctgctggacaagctcgtcctccctgtgctgcccggggccctccaggcgaggcctgggcctcacacacaggtgagggaggcccccacagccagtaaagtggagatccagagggctagagccacctccgaagcccatgggcactgggccctgggagaggcagagccgggaaggtgataggaagctccaggcagggcctaagggaggagggagagaaagggaggaagagagaggggaggagagcctggaggactcttctcccagcacccagcctggcctccacctgattctttccccaggatctctccgagcagcaattccccattcctctcccctattgctggctctgcagggctctgatcaagcggatccaagccatgattcccaaggtgaggcatccagggcctcaagagcccaggagcacacgcatacctgtagctccctgcagctcccacctctctcccaactcacacccccgtcagacccagctggctgccagaagttaggaggggagagagccgcttgtgcattgcccccacccagggaccctgggctcaggctcaggcctggtaggtgccaggtacagttcatgcaacaaacattaagcccccactgtatggaggtgccagccaggagccaaagtacaaaaacggacaagacgcagctttgtcctccagcagctcaccatctgatggagaaagatccccagaggtctctgtagaaaggttgctttgatctttcaagaggggaatttccacagatagattccccatccttgcctgagtccaacttggagtcttccagacctgcagtggctattgtccaatggccccgccagcccagggctaccttgcccaaattggggcccaaatgaggaaaggccctgccccctcagcctttcccagattgggttgcgtgggccaccaggggcacaaggcagcaggtgaggttcctgctgaggcaggtggttcacttgagcccaggagttcaagaccagcttgggcaacatggcgaaaccccgtctctactaagaatacaaaaattagccagatgtgacaggtgcctgtagtcccagctactcgggaggctgaggcaggagaatcacttgaacccaggaggcggaggttgcagtgagccgacatcacgccactgtactctagcctgggtgacagagcaagactctgtctcaaaaaaaaagaaagaaggaaagatcactgcagagattgcagtgagaggtgatgggacagggacggagctgagggctggcctggggatgcatttgggaggtgggcccactgctatgggcatggatgggcctggagcgtgaggaccagggaggactccaaagtgacttttacacactggccagagcaaccagccctctgtaatgccagcagctgagatggggagactaaagaagaaaacaggtttgagcaaaaaaacagagagctccctcctggccatgttgagttcaagatgcctgtgtgaagtgcaggagaggagagtcaggcaagcagctgaatcccaagcattgggggaaggtcaggtccaccatgtcagtctgagagtcactagctgtgggccagagcctttggggccagacgtaggtctgaagctggctcctacactcagtgaccctgtgtgagtcccctgcatcccctggactctctgatccccagtgtccttatttgtgaatagccttgccctcccttctagaagagaatgagggaatgcgtaggaagtgcccagctgggtgctgggcagagagtggaggcttgccaagtgaaggtcccatgctggcctctctccgcccccgccccagggtgcgctacgtgtggcagtggcccaggtgtgccgcgtggtacctctggtggcgggcggcatctgccagtgcctggctgagcgctactccgtcatcctgctcgacacgctgctgggccgcatgctgccccagctggtctgccgcctcgtcctccggtgctccatggatgacagcgctggcccaagtgagcccactgccccctccttagcccaatgcccgctctcctcctccccctaccctgccactgcatgaccctctccctctgtggtcccactgcaatgcaccaaggaggacagaaaccaaacacctctgtagggtggccttgcctgctttccccctaatgctcacatctccagggtcgccgacaggagaatggctgccgcgagactctgagtgccacctctgcatgtccgtgaccacccaggccgggaacagcagcgagcaggccataccacaggcaatgctccaggcctgtgttggctcctggctggacagggaaaaggtatgggctgggcacatggggactcatggtcagggcccgttcaaggcagaaggctgagcccaggaaaggctttgcagccagagacacctaggatgggccagaatggagcacagacaggcagacaggatgtggggcagacaatggtgggactgtaagttagggcagagcctgctaagggttaggagtcgcctctggacaaagggctgtgggctccagaggaccagcaggccctcttcacgggctgagtgagcaccaggcaagccttcagaggcctggttatctaccaggagatgagtaatgctagggccagttcaagccaggaaagggactagccttctctccagggtcctgatccctttactgcccccacactcctcaaggtgtgactcactcaggacaaacccattggcaaaaggagagggctggacttgaaggtcctagggcccttgccaatactcagtcaatgacaggaaattcccttttttttttttttttttttttttttgagatggagttttgctcttgttgcccaggctggagtgcaatggcacaatcttggctcactgcaacctctgcctccgggttcaggcgattctcctgcctcagcctcttgagtagctgggattacaggcatgtgctaccaggcccggctaatttttgtatttttagtagagacaaggtttcaccatattggtcaggctggtctcgaacccctgacctgaagtgatctgcccgccttggcctcccaaagtgctgggattacaggcataagccactgcacccggacaggaaattcccttcttaaagcgagatcctgtcctgaggaaagccagctgatgctcttcccaggaggcagctgtccacactgtgctccctgctcagcaactcccaagcctcccgactgcccatcacatctggtctcaaggaccagatgaacgttaaggttccttctagaactgaaatggaggtggagggaggggagggtggtggctgagattccacccctctgcctgagtcctccgtctccagtgtcgcctgcttttctgatggaagtcctccatttcagcctggctccagtttgttaagggtttcaactgcagccagaggtgttccgtgagggctgatggaggagtcgggagggagccctagagtgatccagagatgtggagaggcccaggaccacacgacaggagagtcctgcaaagggacctccacagctgtgtgtctccctcagtgcaagcaatttgtggagcagcacacgccccagctgctgaccctggtgcccaggggctgggatgcccacaccacctgccaggtacacccaacccctcccaagttggtcctaggacttcccttggctcccagagcccccaccctttgggcccgtgatcctcagaggcctcactcccctgggtccaaggtggtcccaggtgcacgggccagggactgggaggcacccctctctgtttcagtgtaaaaaatcatgagagcatggaaaagggggatgggaagggagggatggcctgaggagtgcggctggatgtccattataggatggggctgtgttccctggccagtgtgtgctggtggggtgggggtacaaagtgggtgttctggagtgaacatctcacctcctcaggctctaaaccctaaggcctgtggctcagggagtggccgaggggtctacagagtcacactggtagcacccactaggcgggaggtggagtgagtgctgttctttcccggaagagctgggtgtggggagctgagggggcccaggcctcagccctggtgctgtccctgtgacaggccctcggggtgtgtgggaccatgtccagccctctccagtgtatccacagccccgacctttgatgagaactcagctgtccaggtgagtccaggcccccagttgcggggaggtaagggggcaggtcctgaccatcagggcatgggaggcccttctgctccccaagcaggaagaggcggccactcctgccggctgctccatcctccctctcaccgcacagctggaggctcctgagggcttctggctggccatcaggaaaacaccctttccggaccccgagcactgccccgcccagaaccccagtcactgagtgcccaacccccagcttcccccccaaccccccgccctgccctgtcccaggcctccctctcagagcttgccccagggactctctggccctcagggttcaatgtattctgaccaaggccaagctttcctggggctcagggaaaatcacactttgctacccgaagctgtatcccctcagatgccaggaaggccgtgatcatctgactccaccctcctgagacacattctctccctgactgtcctgttctaagtcagcggagcaccttaggatggaggggtggaggcgaggccagatgcagcctctgtgaacaggtgcctggaggctgggaaatgaccctgagagggcaggacacagcaaccgtgggcttaaggtgaccttgagagcaagcttggcccactttacaattctgttcagagccagcccctaacatggtggtcatttattcatttgttccctcattttaaaaaatgtaaggccaggcatggtggctcacgccggtaatcccagcactttgggaggccgaggcaggcagatcacctgaggtcaggagttcgagactagcctggccaacatggcgaaaccctgtctctactaaaaatattttttaaaaattagctgagcatggtggcaggtgcctgtaatcccagctactcaggacgcttaggcaggagaatcacttgaacctgggaggcgaaggttgcggtgtgctgagatcgtgccactgcactctagcctaggcaacagagcacaactctgtctcaggaaaaaaaaaaaaaaaaaaaaaggtatttctttgctgggcgcagtggctcacacctgtaatcccagcactttgggagaccgaggcgagtggatcacttgaggtcaggagttcaagaccagccttaccaacatgatgaaaccccgtatctactaaaaaaaaaaaaaaaaaaaaaaaaaaaattagccagatgtggtggcacacacctgtaatcccagctacttgggaggctgaggaggagaattgcttgaacctgggaggcggagattgcagcgagccaagattgcgcctctgcactccagcctgggtgacagagtgagactccgtctcaaaaaaaaaaaaaaaaaagtagtgggtgcctgtggccaggccacatcctagggtaggggctatggctgagccctgccctcctggagctcacagccaagtccacttcttccatctgaggcggggaagccagccctgttcctgaaaccctgcatcacaagcccctgtgggaggcagtggggaggggaggtcctcccccactcagacctgacccacagggaccagtttaatgtgtccttgccccagtgatgacagctggggatctgggggtggggagtcacccaggacccgggcagtcgcctttccccagctcctagggctcccggccttccctgctgaaacagcaagaccagtgggttggcgtgggaggcctgggcttcaaaccacctctgctatcacctggctgtgggtccccaggcaggacatacacacagtccctctctggccctcatcctcctcagctgcaaaggaaaagccaagtgagacgggctctgggaccatggtgaccaggctcttcccctgctccctggccctcgccagctgccaggctgaaaagaagcctcagctcccacaccgccctcctcaccgcccttcctcgggagtcacttccactggtggaccacgggcccccagccctgtgtcggccttgtctgtctcagctcaaccacagtctgacaccagagcccacttccatcctctctggtgtgaggcacagcgagggcagcatctggaggagctctgcagcctccacacctaccacgacctcccagggctgggctcaggaaaaaccagccactgctttacaggacagggggttgaagctgagccccgcctcacacccacccccatgcactcaaagattggattttacagctacttgcaattcaaaattcagaagaataaaaaatgggaacatacagaactctaaaagatagacatcagaaattgttaagttaagctttttcaaaaaatcagcaattccccagcgtagtcaagggtggacactgcacgctctggcatgatgggatggcgaccgggcaagctttcttcctcgagatgctctgctgcttgagagctattgctttgttaagatataaaaaggggtttctttttgtctttctgtaaggtggacttccagcttttgattgaaagtcctagggtgattctatttctgctgtgatttatctgctgaaagctcagctggggttgtgcaagctagggacccattcctgtgtaatacaatgtctgcaccagtgctaataaagtcctattctcttttatgagaaagaaaaagacaccagtcctttaaagtgctgcagtatggccagacgtggtggctcacacctgcaatcccagcaccttaggaggccgaggcaggaggatcc

SEQ ID NO: 5402 - DNA, 577 bp, Homo sapiens; identical to SEQ ID NO: 4614

SEQ ID NO: 5403 - DNA, 1717 bp, Homo sapiens
aagcttcagctctttccttcctcaatccttctcctggcacctctgatatgccttttgaaattcatgttaaagaatccctaggctgctatcacatgtggcatctttgttgagtacatgaataaatcaactggtgtgttttacgaaggatgattatgcttcattgtgggattgtatttttcttcttctatcacagggagaagtgaaatgacaacctcactagatacagttgagacctttggtaccacatcctactatgatgacgtgggcctgctctgtgaaaaagctgataccagagcactgatggcccagtttgtgcccccgctgtactccctggtgttcactgtgggcctcttgggcaatgtggtggtggtgatgatcctcataaaatacaggaggctccgaattatgaccaacatctacctgctcaacctggccatttcggacctgctcttcctcgtcacccttccattctggatccactatgtcagggggcataactgggtttttggccatggcatgtgtaagctcctctcagggttttatcacacaggcttgtacagcgagatctttttcataatcctgctgacaatcgacaggtacctggccattgtccatgctgtgtttgcccttcgagcccggactgtcacttttggtgtcatcaccagcatcgtcacctggggcctggcagtgctagcagctcttcctgaatttatcttctatgagactgaagagttgtttgaagagactctttgcagtgctctttacccagaggatacagtatatagctggaggcatttccacactctgagaatgaccatcttctgtctcgttctccctctgctcgttatggccatctgctacacaggaatcatcaaaacgctgctgaggtgccccagtaaaaaaaagtacaaggccatccggctcatttttgtcatcatggcggtgtttttcattttctggacaccctacaatgtggctatccttctctcttcctatcaatccatcttatttggaaatgactgtgagcggagcaagcatctggacctggtcatgctggtgacagaggtgatcgcctactcccactgctgcatgaacccggtgatctacgcctttgttggagagaggttccggaagtacctgcgccacttcttccacaggcacttgctcatgcacctgggcagatacatcccattccttcctagtgagaagctggaaagaaccagctctgtctctccatccacagcagagccggaactctctattgtgttttaggtcagatgcagaaaattgcctaaagaggaaggaccaaggagatgaagcaaacacattaagccttccacactcacctctaaaacagtccttcaaacttccagtgcaacactgaagctcttgaagacactgaaatatacacacagcagtagcagtagatgcatgtaccctaaggtcattaccacaggccaggggctgggcagcgtactcatcatcaaccctaaaaagcagagctttgcttctctctctaaaatgagttacctacattttaatgcacctgaatgttagatagttactatatgccgctacaaaaaggtaaaactttttatattttatacattaacttcagccagctattgatataaataaaacattttcacacaatacaataagttaactattttattttctaatgtgcctagttctttccctgcttaatgaaaagctt

SEQ ID NO: 5404 - DNA, 1915 bp, Homo sapiens
ttagagccgggtaggggagcgcagcggccagatacctcagcgctacctggcggaactggatttctctcccgcctgccggcctgcctgccacagccggactccgccactccggtagcctcatggctgcaacctgtgagattagcaacatttttagcaactacttcagtgcgatgtacagctcggaggactccaccctggcctctgttccccctgctgccacctttggggccgatgacttggtactgaccctgagcaacccccagatgtcattggagggtacagagaaggccagctggttgggggaacagccccagttctggtcgaagacgcaggttctggactggatcagctaccaagtggagaagaacaagtacgacgcaagcgccattgacttctcacgatgtgacatggatggcgccaccctctgcaattgtgcccttgaggagctgcgtctggtctttgggcctctgggggaccaactccatgcccagctgcgagacctcacttccagctcttctgatgagctcagttggatcattgagctgctggagaaggatggcatggccttccaggaggccctagacccagggccctttgaccagggcagcccctttgcccaggagctgctggacgacggtcagcaagccagcccctaccaccccggcagctgtggcgcaggagccccctcccctggcagctctgacgtctccaccgcagggactggtgcttctcggagctcccactcctcagactccggtggaagtgacgtggacctggatcccactgatggcaagctcttccccagcgatggttttcgtgactgcaagaagggggatcccaagcacgggaagcggaaacgaggccggccccgaaagctgagcaaagagtactgggactgtctcgagggcaagaagagcaagcacgcgcccagaggcacccacctgtgggagttcatccgggacatcctcatccacccggagctcaacgagggcctcatgaagtgggagaatcggcatgaaggcgtcttcaagttcctgcgctccgaggctgtggcccaactatggggccaaaagaaaaagaacagcaacatgacctacgagaagctgagccgggccatgaggtactactacaaacgggagatcctggaacgggtggatggccggcgactcgtctacaagtttggcaaaaactcaagcggctggaaggaggaagaggttctccagagtcggaactgagggttggaactatacccgggaccaaactcacggaccactcgaggcctgcaaaccttcctgggaggacaggcaggccagatggcccctccactggggaatgctcccagctgtgctgtggagagaagctgatgttttggtgtattgtcagccatcgtcctgggactcggagactatggcctcgcctccccaccctcctcttggaattacaagccctggggtttgaagctgactttatagctgcaagtgtatctccttttatctggtgcctcctcaaacccagtctcagacactaaatgcagacaacaccttcctcctgcagacacctggactgagccaaggaggcctggggaggccctaggggagcaccgtgatggagaggacagagcaggggctccagcaccttctttctggactggcgttcacctccctgctcagtgcttgggctccacgggcaggggtcagagcactccctaatttatgtgctatataaatatgtcagatgtacatagagatctattttttctaaaacattcccctccccactcctctcccacagagtgctggactgttccaggccctccagtgggctgatgctgggacccttaggatggggctcccagctcctttctcctgtgaatggaggcagagacctccaataaagtgccttctgggctttttct

SEQ ID NO: 5405 - DNA, 1130 bp, Homo sapiens; identical to SEQ ID NO: 2048

SEQ ID NO: 5406 - DNA, 8670 bp, Homo sapiens
gagctcaagagttcaagacccgtctgggcaagatggcaaaactccatcaccacaaaagatgcaaaaagatgcgcacagtggcgcacacctatagccccagttactgaggaggttaatgtgggaggatcacatgaggctgcagtgagctgtgatggtgccactgtactccagccttggcgacagtgagtctatgtctcaaataagtaagtaaacaaaaattaaaaagaatccagtccacagggcatttgaaggcaagaggaaaagatgccagaatcagagatggggagaagatgggcttcacgcacctgctgaggttgagaaatgagacagataggctgagtgtggggtggagagaggatgggcagagagactgaggctggtctgaatggaaatgaaatgttagggctctcagggttatcggggaataattggagcttctaggaaaggtttaacgttgtgaccacctgtgtgcgtcatgcctccccaccccttactaattgtgtgaatttggcagactttgagtctcagtgttctcctctgtgaagtggggtcatcttattccaactcctgggattgttgtgtgaattaaatggggtaatgtacggagagcacctgacgcacagcgagtgcttcaaaatttcagtctgcaccccccagcaaaggatatgcacacgcccattgtgagtgacaaatccaggatgacctgaacccaatgtgataacgtgggtcctcgcatgctggtcatgctgccgggagacacttatggatccaattagtacaacaggggaaataaattatttaatgcattttgctaagacagaatacctcagaacttattttgtggggtggggcataataaagggggtccttctgctgaaaacgtttaagctcaggttcgtggcaccactcaaccaaggtcgacagtcacacagtaagccagaggcaatgtcaggacttaaactaaacctgtggcccccacaatgaggccatttctctttcccctgaacggcctggggaaagggggtgggtgggcagaacttggcagtggccaatccctcacttctgtcccctggttttctcctgcccttatctctaggcttgcattgattgattgattgagacagggtcttgctctgtcgtccaggctggagtgcagtggcacgatcatggctcactgcagcctcaaactcctaggctcaagtggtctttccgcctcctatctcccgagtacccatatccctaggcttttaaaatggcttccaggtatctggctgccgtctcagacatccacctgggcttctgggcagggactgtccgggaaacctcatctatgtgaagcaggtgtgggtgtaggaaggccgcttggaaatgaatcagcactgtctcctgtttgagtcgtaagcagggcgccagagggtctggcggacaagaaagggaggatgacaggaggccggcactgcaatgacacgccttagccaccagagggcacgaagcagctgggcaaaatcccgcggggcccctggtggaaaatttctggcacctggagcccggagatggggtggacggaatgtgaggacccagcttcctgaggctgggccggggcagagtcactgctttggatgtccgcagggcctgcttgtgtcttgactactctgcctttgtagacagctggagaatgtgagagtgggattgggatcggactctagggccattccgtacaactctcctgccctgccgtgggggagggagttgcccaaggttacgcagcaagttagtggcaaatgaatacgattatcaccagtctcaggtatatggccatttgatgggcgcagtcgcagcctcagttcctgagacagagacacctgattaaggacaggccttcaggagctgaccctagtgacccgcggctctgctgctgtctctgtttttctccctggcttttccatctgactgactctttgtcttcttcgtctgcctgcctgtctccgtctctgcccgctggggggtttgctcaactccctcactgggtcctgggagccgcagtttcctgctgtcactcctcagggatttgtagctctctgaagctcttttccgacccgttgtctcggttccactcttgggatccagaggagaggtgattatttcgtagcatagtcagtggtgtgatttcacggggtgagaaggactcccttgctcctaagcactcctccagtgacccctgttgccatgtggtagccgtaagcactggttggcacctggtgtgggcgagacccttacctcatgcagaaatgagtaagactggtgagctcactatgtggggtgaggctgagagaaaacaagtacacaggtgattcagtcaaaatcagaattctctaagtacacacgaaaagggcaaaaggggcgctttgtacaggacagaacaggtagacactgaatccggttgggccctgggaaggctccctgcagtggcctttgaagggggggttggatttcagcaggatagagggcatgggcatgtgtgggcacgttctgaacagaggggtcagcgcaagccgagggtcttggccacactagttgcatgtgccggtgtgtttaagggacacgcagcagcaggccgagtctggagcgcctcactgccaggctttttaaaaatttttaattttaatttaattttattttatttttactttaagttctggcatacatgtgcagaatgtggtttgttacataggtatacatgtgccatggtggtttgctgcacctatcaacccatcatctaggttttaagccccgcatgcatcaggtattagtcctaatgctctccctccccttgcccccatccttctccccgcaactgcccacaggccctggtatgtggtgttcccttccctgtgtccatatgttctcattgttcaactcccacttatgagtgagaacataccgcctggctttaagggacagccatggggatgcactgcagtttctgagcagggaaggccctgtggaggcccttagttaaaaggaaagaatggctgtgaaaatcgatgcattgcgctcccttgtccctcaccctcagtgtgaagggtttttattccgagttctacttgaagtaggcctcgatgggaagacaagtagcatgaggggttcaagtactgaggggagcaagggacactcggtggctgtgccaaggtgtagaagaggacactgggggccccaagacctgacttcatgtacactgctcaggctggcccccaagtcacacggtgaccgctaggaagggaccagcctgttctcagtctgatcctacagccatgtcattatccaaagctcctcctggcagggcctgtttggggtctctgtgccagtgctttccctgccaggctgggctggggcttccacctactgctctgggactgctgctgccctggccctgggggaggagggtgtgccgctgagtcactgcctgggcatctgggcctggaacctcgggtgagtcacttagggctgaggtagaggggctgggggaggggaagaagctactcgacagctggagcagggaggggagctggggccacaggaagggcggtgccctgatgcccagacgggccgggatagacaaagggccaaggaggaaggggccctgggagggggcagccctcccttgggctggggtctgaatggcacagtgtttgcctttctccgggtctggggaggacatgtgtgtggggggcagtgagagagggctgtggctgagggctgtgcttcaggcctggattctggcttgggaagctgtccagctggtgttttcagccttgggtagggatgtacccctacccacccacccagccctcaagctggagaagaggaggccaaagttttcctgttcagcctttaactactcgggacttccttatgctccccacagactgtggcccagcccaactgcggctgtgtgtagagcaaccccatttctcactgcttccccatccttccagacaccttcctacacagagggaccttcccaggtatttctaagcacacttagttacctcattacctcattaagaggtattctggtgctggccattaaaagtcactccacttcatccatgccctgaagtcagtcctgtccttctcctcctgatgtcccccagctgcctcctctggcccccagcttcctaaggtggccccaggttgcttctctctcacacacacgggcgcatgtatgtacacgagcactggaccatgaagtctcagcgtgtgctcacagcctctcacacaggagtgggctgtgactcacaggcatgtcatgagaatgaggcctggcaccagtctccaggccccagagcaggggttgcctcccctcaccccggtccaggatgcccagtccccacgacacctcccacttcccactgtggcctgggtgggctcaggggctgcccttgacctggcctagagccctcccccagctggtggtggagctggcactctctgggagggagggggctgggagggaatgagtgggaatggcaagaggccagggtttggtgggatcaggttgaggcaggtttggtttccttaaaatgccaagttgggggccagtggggcccacatataaatcctcaccctgggagcctggctgccttgctctccttcctgggtctgtctctgccacctggtctggtgagtacctctgtcctgctgagggcagggtggggaggatccccgtgggtctctgtctttgtctccacagttctctcattccagcttccctggtgggatcaacctgggcctctctgggccttcccccttggaagaactctctgtgaagtgctgaagtgttgactgaagggttttttttttttttttttttttttgagatggagtctcgctctgtcgcccaggctggagtacagtggtgtgatctcagctcactgcaaactccccctcccaggttcacgccatttccctgcctcagcctcccgagtagctgggactgcaggcgcccaccaccatgcccggctaatttttttgtatttttagtagagatggggtttcaccatgttagccaggatggtctcgatctcctgatctcgtgatccacccatctcggcctcccaaagtgctgggattacaggagtaagccaccgcgcccggccgactgaagggtttttctccaggttcctctgtgaggtctcagtgcaggggttgctctgaggccctcccctggatatctcagtctaggggcccttctttgggggtctaggcctaggagcaggaggtgtgcatgtgggcgttgctgcaaaaagaatcctgagatttttttttttttttttttttttgcaaagtcctggattctagcaggactaaggtgcaagaggcaggggtctcaagactctgcctgggtcatggccccaagcagcaaagctctgccccctgcctcggtgaaggcagggctggcatgatgggcccagggcatgccctgcctctggcatagctcctctggcctcaccctgaaacctgcctaacctttccaggctggtctgagtattctcagaggccttgccgctgaggtctgtcccatcctgatcccaaggcaatgaacatttcatatctttaattctaattccaacaggatccttcctggtggagagaatgttaagttgcccccaccctatccatgcccctgtctgcctagaggctcaggggccttcagggtgaggggagacacattccccaccctctgggagctcctagtctgagagaggaaacactcctgcccaagggagcttccagttagatggcagagagagatgcctctggcttcaggagtcccgagtctaaggagggaaacgactccttcagggagcttcctgctcctaggctgtagccatggctcctgccagactgcacaggagcccccatctgccagccggtgcatgtggccctgctccccagagcctgcgcagatgccatcaaaatgggactctggtcaccctgtcatttcccttctggcagacactaaaatggggagccctgccctcaggggggtgtcccaagtgccatcagaggaggcttggtgactcccagacacaagggaagctttagcgtctgccctcagggtgagatggaggtatccctccggcctcagggaaccacagtctgaggggagatgcagcccctgccttcccattcagagaggggttttgtgaggtggcttgggggcatagggcagaagtggatcctacaggctgagctaaggccccaagagcctcagcagtgtacccatcacctggcacctctgcagccacagatccatgatgtgcagttctctggagcaggcgctggctgtgctggtcactaccttccacaagtactcctgccaagagggcgacaagttcaagctgagtaagggggaaatgaaggaacttctgcacaaggagctgcccagctttgtgggggtgagtggcacaggcctgtgggggaggtcctggtgtgagtgtgggggtgcaggttaaatctctcccccagttccgggtgcctgtcgatgcaggtgccagggtggggcccagcccctccccactttagcttcatggctccactggagtggaaatgaggcccgagtgggagtgcttaattaatggctgtttcctgcaacattccagagaaccatgtgctgtgagggccttccgagtccatctgtttaatcctgtcattggaacttgagaaaccagagcccagaagggaaaagtgattgtcccaagatcacacagcactggcacgttctctctctctcttttcttttctttttttttttttgagatggagtttccctcttgttgcccaggctggagtgcaatggcacgatctcggctcactgcaacctctgcctccaggggtcaagcaattctcctgtctcagcctcctgagtagctgggactacaggcgcatcccactacgcccagctaatttttgtatttttagtagagacagggtttcaccatattggccaggctggtctcgaactcctgacctcgtgatctacctgcctcggcttcccaaagtgatttttgtatttttagtagagacggggtttcatcatattggtcaggctggtctcgaactcctgacctcaggtgatctgccctcctcggcctctgaaagtgctgggcttacaggcgtgagcaccgtgcccggactccttttttttttttttttttttgtggtggggggacaagatctcactctgtcacccaggctggatcatagctcactgtaatctcgaactcctgggctcaagcaatcctcccaagtagttggaactacaggagtattgtcaccatgcctggccaatttttattttttgtagagatggagtcttgctatgttgtccaggctgggcttgaactcctgggttcaagcaatcctcccacctcggcctcccaaagtattggaattacagatgtgagccactgtgcttgacctctttccatttttatatgccaaactaagaaagtatgttagggatagaaaagccctgctcagatatatagtctgggacattttgtggagaaatgcatcgaccttcaatttgtccctcaccctccctatactgactcattggtgattcccaaagttaggtgtcaggctttgaacacatgaggcaggtccttctttccttggtttaattttgtttttgtggctggttaaatttttctaattatttcggctagtattaaaaaagtgtttttcagctgggtgcagtggcctatgcctgtaatccccacagtgtgggaggctaaggcaggaggatctcttaagcccaggagttcgaccagcctgggcaacatagcaagactccatctctacaaaaataaaaataaaaattggccaggcatggtggcatacgcttgtagtcccagctacttgggaggctaaaggtgggaggattgctggagcccaggaggttgaggctgcagtgagttgtgattgtgccactgcactccaacctgggctaacagagcaagaccttgtcttaaaaaataaaaagtgttcttttctgaatctacctggctggtgttggggagcagcaacttcggtttcctcatcagcagaatggggtgatgatacctacctcgctgggctcctgtgggattcgagctgatgcatgctcagaggagcatccagtgtcctccctgtgtccaggaggagggcacactggagatgctcaccaatgagtatctgtctctctccttactcactgggccctcttggtagctcccagagcctcctgcccaccttatacccagctgcccagtggggagggagagctggaaccaacctgaatgtgtgagggtctgggtgtttggtggagctggggttggggctggcttggtgatgagtgtatttcctgtcactttcaggagaaagtggatgaggaggggctgaagaagctgatgggcagcctggatgagaacagtgaccagcaggtggacttccaggagtatgctgttttcctggcactcatcactgtcatgtgcaatgacttcttccagggctgcccagaccgaccctgaagcagaactcttgacttcctgccatggatctcttgggcccaggactgttgatgcctttgagttttgtattcaataaactttttttgtctgttga

SEQ ID NO: 5407 - DNA, 2720 bp, Homo sapiens
cgcccccccggtgtccgccctgctgtcggcgctggggatgtcgacgtacaagcgggccacgctggacgaggaggacctggtggactcgctctccgagggcgacgcataccccaacggcctgcaggtgaacttccacagcccccggagtggccagaggtgctgggctgcacggacccaggtggagaagcggctggtggtgttggtggtacttctggcggcaggactggtggcctgcttggcagcactgggcatccagtaccagacaagatccccctctgtgtgcctgagcgaagcttgtgtctcagtgaccagctccatcttgagctccatggaccccacagtggacccctgccatgacttcttcagctacgcctgtgggggctggatcaaggccaacccagtccctgatggccactcacgctgggggaccttcagcaacctctgggaacacaaccaagcaatcatcaagcacctcctcgaaaactccacggccagcgtgagcgaggcagagagaaaggcgcaagtatactaccgtgcgtgcatgaacgagaccaggatcgaggagctcagggccaaacctctaatggagttgattgagaggctcgggggctggaacatcacaggtccctgggccaaggacaacttccaggacaccctgcaggtggtcaccgcccactaccgcacctcacccttcttctctgtctatgtcagtgccgattccaagaactccaacagcaacgtgatccaggtggaccagtctggcctgggcttgccctcgagagactattacctgaacaaaactgaaaacgagaaggtgctgaccggatatctgaactacatggtccagctggggaagctgctgggcggcggggacgaggaggccatccggccccagatgcagcagatcttggactttgagacggcactggccaacatcaccatcccacaggagaagcgccgtgatgaggagctcatctaccacaaagtgacggcagccgagctgcagaccttggcacccgccatcaactggttgccttttctcaacaccatcttctaccccgtggagatcaatgaatccgagcctattgtggtctatgacaaggaataccttgagcagatctccactctcatcaacaccaccgacagatgcctgctcaacaactacatgatctggaacctggtgcggaaaacaagctccttccttgaccagcgctttcaggacgccgatgagaagttcatggaagtcatgtacgggaccaagaagacctgtcttcctcgctggaagttttgcgtgagtgacacagaaaacaacctgggctttgcgttgggccccatgtttgtcaaagcaaccttcgccgaggacagcaagagcatagccaccgagatcatcctggagattaagaaggcatttgaggaaagcctgagcaccctgaagtggatggatgaggaaacccgaaaatcagccaaggaaaaggccgatgccatctacaacatgataggataccccaacttcatcatggatcccaaggagctggacaaagtgtttaatgactacactgcagttccagacctctactttgaaaatgccatgcggtttttcaacttctcatggagggtcactgccgatcagctcaggaaagcccccaacagagatcagtggagcatgaccccgcccatggtgaacgcctactactcgcccaccaagaatgagattgtgtttccggccgggatcctgcaggcaccattctacacacgctcctcacccaaggccttaaactttggtggcataggtgtcgtcgtgggccatgagctgactcatgcttttgatgatcaaggacgggagtatgacaaggacgggaacctccggccatggtggaagaactcatccgtggaggccttcaagcgtcagaccgagtgcatggtagagcagtacagcaactacagcgtgaacggggagccggtgaacgggcggcacaccctgggggagaacatcgccgacaacgggggtctcaaggcggcctatcgggcttaccagaactgggtgaagaagaacggggctgagcactcgctccccaccctgggcctcaccaataaccagctcttcttcctgggctttgcacaggtctggtgctccgtccgcacacctgagagctcccacgaaggcctcatcaccgatccccacagcccctctcgcttccgggtcatcggctccctctccaattccaaggagttctcagaacacttccgctgcccacctggctcacccatgaacccgcctcacaagtgcgaagtctggtaaggacgaagcggagagagccaagacggaggaggggaaggggctgaggacgagacccccatccagcctccagggcattgctcagcccgcttggccacccggggccctgcttcctcacactggcgggttttcagccggaaccgagcccatggtgttggctctcaacgtgacccgcagtctgatcccctgtgaagagccggacatcccaggcacacgtgtgcgccaccttcagcaggcattcgggtgctgggctggtggctcatcaggcctgggccccacactgacaagcgccagatacgccacaaataccactgtgtcaaatgctttcaagatatatttttggggaaactattttttaaacactgtggaatacactggaaatcttcagggaaaaacacatttaaacacttttttttttaagccc

SEQ ID NO: 5408 - DNA, 4139 bp, Homo sapiens
ccgctccacctctcaagcagccagcgcctgcctgaatctgttctgccccctccccacccatttcaccaccaccatgacaccgggcacccagtctcctttcttcctgctgctgctcctcacagtgcttacagttgttacaggttctggtcatgcaagctctaccccaggtggagaaaaggagacttcggctacccagagaagttcagtgcccagctctactgagaagaatgctgtgagtatgaccagcagcgtactctccagccacagccccggttcaggctcctccaccactcagggacaggatgtcactctggccccggccacggaaccagcttcaggttcagctgccacctggggacaggatgtcacctcggtcccagtcaccaggccagccctgggctccaccaccccgccagcccacgatgtcacctcagccccggacaacaagccagccccgggctccaccgcccccccagcccacggtgtcacctcggccccggacaccaggccggccccgggctccaccgcccccccagcccacggtgtcacctcggccccggacaccaggccggccccgggctccaccgcccccccagcccacggtgtcacctcggccccggacaccaggccggccccgggctccaccgcccccccagcccacggtgtcacctcggccccggacaccaggccggccccgggctccaccgcccccccagcccacggtgtcacctcggccccggacaccaggccggccccgggctccaccgcccccccagcccacggtgtcacctcggccccggacaccaggccggccccgggctccaccgcccccccagcccacggtgtcacctcggccccggacaccaggccggccccgggctccaccgcccccccagcccacggtgtcacctcggccccggacaccaggccggccccgggctccaccgcccccccagcccacggtgtcacctcggccccggacaccaggccggccccgggctccaccgcccccccagcccacggtgtcacctcggccccggacaccaggccggccccgggctccaccgcccccccagcccacggtgtcacctcggccccggacaccaggccggccccgggctccaccgcccccccagcccacggtgtcacctcggccccggacaccaggccggccccgggctccaccgcccccccagcccacggtgtcacctcggccccggacaccaggccggccccgggctccaccgcccccccagcccacggtgtcacctcggccccggacaccaggccggccccgggctccaccgcccccccagcccacggtgtcacctcggccccggacaccaggccggccccgggctccaccgcccccccagcccacggtgtcacctcggccccggacaccaggccggccccgggctccaccgcccccccagcccacggtgtcacctcggccccggacaccaggccggccccgggctccaccgcccccccagcccacggtgtcacctcggccccggacaccaggccggccccgggctccaccgcccccccagcccacggtgtcacctcggccccggacaccaggccggccccgggctccaccgcccccccagcccacggtgtcacctcggccccggacaccaggccggccccgggctccaccgcccccccagcccacggtgtcacctcggccccggacaccaggccggccccgggctccaccgcccccccagcccacggtgtcacctcggccccggacaccaggccggccccgggctccaccgcccccccagcccacggtgtcacctcggccccggacaccaggccggccccgggctccaccgcccccccagcccacggtgtcacctcggccccggacaccaggccggccccgggctccaccgcccccccagcccacggtgtcacctcggccccggacaccaggccggccccgggctccaccgcccccccagcccacggtgtcacctcggccccggacaccaggccggccccgggctccaccgcccccccagcccacggtgtcacctcggccccggacaccaggccggccccgggctccaccgcccccccagcccacggtgtcacctcggccccggacaccaggccggccccgggctccaccgcccccccagcccacggtgtcacctcggccccggacaccaggccggccccgggctccaccgcccccccagcccacggtgtcacctcggccccggacaccaggccggccccgggctccaccgcccccccagcccacggtgtcacctcggccccggacaccaggccggccccgggctccaccgcccccccagcccacggtgtcacctcggccccggacaccaggccggccccgggctccaccgcccccccagcccacggtgtcacctcggccccggacaccaggccggccccgggctccaccgcccccccagcccacggtgtcacctcggccccggacaccaggccggccccgggctccaccgcccccccagcccacggtgtcacctcggccccggacaccaggccggccccgggctccaccgcccccccagcccacggtgtcacctcggccccggacaccaggccggccccgggctccaccgcccccccagcccacggtgtcacctcggccccggacaccaggccggccccgggctccaccgcccccccagcccacggtgtcacctcggccccggacaccaggccggccccgggctccaccgcccccccagcccacggtgtcacctcggccccggacaccaggccggccccgggctccaccgcccccccagcccacggtgtcacctcggccccggacaccaggccggccccgggctccaccgcccccccagcccatggtgtcacctcggccccggacaacaggcccgccttgggctccaccgcccctccagtccacaatgtcacctcggcctcaggctctgcatcaggctcagcttctactctggtgcacaacggcacctctgccagggctaccacaaccccagccagcaagagcactccattctcaattcccagccaccactctgatactcctaccacccttgccagccatagcaccaagactgatgccagtagcactcaccatagctcggtacctcctctcacctcctccaatcacagcacttctccccagttgtctactggggtctctttctttttcctgtcttttcacatttcaaacctccagtttaattcctctctggaagatcccagcaccgactactaccaagagctgcagagagacatttctgaaatgtttttgcagatttataaacaagggggttttctgggcctctccaatattaagttcaggccaggatctgtggtggtacaattgactctggccttccgagaaggtaccatcaatgtccacgacgtggagacacagttcaatcagtataaaacggaagcagcctctcgatataacctgacgatctcagacgtcagcgtgagtgatgtgccatttcctttctctgcccagtctggggctggggtgccaggctggggcatcgcgctgctggtgctggtctgtgttctggttgcgctggccattgtctatctcattgccttggctgtctgtcagtgccgccgaaagaactacgggcagctggacatctttccagcccgggatacctaccatcctatgagcgagtaccccacctaccacacccatgggcgctatgtgccccctagcagtaccgatcgtagcccctatgagaaggtttctgcaggtaacggtggcagcagcctctcttacacaaacccagcagtggcagccgcttctgccaacttgtagggcacgtcgccgctgagctgagtggccagccagtgccattccactccactcaggttcttcaggccagagcccctgcaccctgtttgggctggtgagctgggagttcaggtgggctgctcacagcctccttcagaggccccaccaatttctcggacacttctcagtgtgtggaagctcatgtgggcccctgaggctcatgcctgggaagtgttgtgggggctcccaggaggactggcccagagagccctgagatagcggggatcctgaactggactgaataaaacgtggtctcccactg

SEQ ID NO: 5409 - DNA, 1955 bp, Homo sapiens
gaattcaccaagcgttggattgttcacccactaatagggaacgtgagctgggtttagaccgtcgtgagacaggttagttttaccctactgatgatgtgttgttgccatggtaatcctgctcagtacgagaggaaccgcaggttcagacatttggtgtatgtgcttggctgaggagccaatggggcgaacgtaccatctgtgggattatgactgaacgcctctaagtcagaatcccgcccaggcgaacgatacggcagcgccgcggagcctcggttggcctcggatagccggtcccccgcctgtccccgccggcgggccgcccccccctccagcgccccgcgcgcgcgggagggcgcgtgccccgccgcgcgccgggaccggggtccggtgcggagtgcccttcgtcctgggaaacggggcgcggccggaaaggcggccgccccctcgcccgtcacgcaccgcacgttcgtggggaacctggcgctaaaccattcgtagacgacctgcttctgggtcggggtttcgtacgtagcagagcagctccctcgctgcgatctattgaaagtcagccctcgacacaagggtttgtccgcgcgcgcggcggcgtgcgtgcggggggcccggcggggcgtgcgcgtccggcgccgtccgtccttccgttcgtcttcctccctcccggcctctccgccgaccgcgggcgtggtgggggggtgggggggggacgcgcgaccccggtcggcgcgccccgcttcttcggttcccgcctcctccccgttcaccgcggggcggctcgtccgctccgggccgggacggggtccggggagcgtggtttgggagccgcggaggcggccgcgccgagccgggcccgtgcgcggtccccgtcccgggggttggccgcgcgggccccggtggggccacccggggtcccggccctcgcgcgtccttcctctcgctcctccgcacgggtcgaccagcagaccgcgggtggtgggcggcgggcggcgaggccgcacgggcgtccccgcacccggccgacctccgctcgtgacctctcctcggtcgggctccggggtcgaccgcctgccccgcgggcgtgagactcagccgctgtctcgccgtgtcccgggtcgaccggcgggcttctccaccgagcggcgtgtaggagtgcccgtcgggacgaaccgcaaccggagcgtccccgtctcggtcggcacctccggggtcgaccagctgccgcccgcgagctccggacttagccggcgcctgcacgtgtcccgggtcgaccagcaggcggccgcgacgtgcggcgcaccgacgagagggcgtgcattcccgttcgcgcgcccggaccctccaccggcctgggcccgacggtggagctgggaccacgcggaactccctctcctacatttttttcagccccaccgcgagtttgcgtccgcgggattttaagagggagtcactgctgccgtcagccagtaatgcttcctccttttttgcttttaggttttgctcttgcctttttttttttttttttctttctttctttctttctttctttctttctttctttctttctttctttctcgctctcgcctctcgctctctccctcgctcgttttctttctctttctctttctctctctctctctctctctctctctctgtctctcgctctcgccctctctctctctctcttctctctgtctctctctgtctctctctctctctctctctctctctctctctctctctctctctctctctccctccccctccctccctctctccccttccttggtgccttctcggctcttgacacttagccgctgtctcgccgtgtcccgggtcgaccggcgggccttctccaccgagcggcgtgtaagagtgcccgtcgggacgagccggacccgccgcgtccccgtctcggtcggcactccggggtcgaccagctg

SEQ ID NO: 5410 - DNA, 512 bp, Homo sapiens
  misc_feature (1)..(512): n=a,t,g or c
ggcacgaggattatattttgcatctccctgcaagtctgttttatgttatttatagcttcctattcgtgtagacaccagcagtaaactggggaatatttgtggcaggaatttctaagaacaacctttagcatcatctcaggccctgatccatttccttttccacaaaattgtttgagattatatcgtatgtgttacagaaagaatgtttttctgtatgctcgaaactgtatactaaagtaaaataataaagttaaccagaattatccatggggaacaattccaattaaaataaaatgccagtatctggtaaaacctggtagtaatgctttttgtggtgatatccaggtaatgattagatgcagtaaacccgggtagtagggaagaagagagatgtggggacaagcagcccgaataccttgctggcatagcagctgcctacctgcacccggagacctgagcagatattactagggtatttatttgacagccagcttagcagtcangaaggacan

SEQ ID NO: 5411 - DNA, 596 bp, Homo sapiens
  misc_feature (1)..(596): n=a,t,g or c
ctctctggaagggacattccatctccatggtgcactctgaggggcactgtcaactagagattggccccatccaggtgggaggaacccctttggatggtgagtatccaatctgctgtgcatttgacaggatctctgaatggctaggtaatggatcccaagcaggctcacaaatttaaatgagggctttgtgtgcagaaagaggaataagtacagattattttcctaccactagatttttggggagagtcaccatggaatgttgacaattacttaaaatattttaagctcccttgctgaattcctgtcctgtccctgaggaatcagatggtcatacagccatagnacccacccgaaatttccctaggagttggagtaatgctagaattgaagaccttctgagtaaagggcttctctgccttctcagaggcaggagaatttgcactggttgtgttaaatgtataaaaagctatatgttcaccagtttactcatttccaatgtgtagatgaataaaatgtagtgtacaaattatttgaaaatcccagaaggaaggtacttttcaaatacagtattttttttacaataacttacgattttt

SEQ ID NO: 5412 - DNA, 1023 bp, Homo sapiens
tcccagacgctgcccatggaggcgtccagcgagccgccgctggatgctaagtccgatgtcaccaaccagcttgtagattttcagtggaaactgggtatggctgtgagctcagacacttgcagatctcttaagtatccttacgttgcactgatgctaaaagtggcacatcattcaggccaacgtaaagaccaagtgctttgaaatgacgattccacagtttcagaatttctacagacagttcaaggaaattgctgcagttattgaaacggtgtgaagacgggttctttggttgataaattgcgatcattctaaagtcatggacttcactttcgggaacaaaacctaataaggatggaacaattattgaatgacaaatgccctttggttttcccttgttttaaaataataagaatctgggccaaccgggtgaatctgatggaaacaaggtctttagataagcggcccgaagcttatccccttaggtgcgggtaaattttaccttgggacttggccgcggtgttacaacgcgggtggcctgtggaaactctgtgcggttcgcccacattaatcgccccttgagggcgattcccgccgttgtccacgcggggcgatatgtcgcgacaaggcccggaccgtgttgccgtgtccacagatggggccccccgaagtcgcgcttggagcgtccccctttgggcgcgtttgacgcgcgtggggtttgtgggtatgcgcgggagccggggaaccttgtagtgcgctgtcccgggggtttagggtgtcgccgcctttcgcggtttccggggtctcccgaagtgtattaggggcccctggcgcccagagagtgtttgccgccccacatatgtttgggggcgctgtgtgccccccgagggagctcttcgggagcggcggtatatgtcctttgaaacaccgctctcttttttgccgcgccgcaggagtgtataggaggagttgtgcgcgtggcttacgtcaccaaagtggttgtttctgagagccgtccggcctagg

SEQ ID NO: 5413 - DNA, 422 bp, Homo sapiens
gggagcgtggccagccgcttgccgatcgccatcagggacttgatgaattctctctcaggagccagtcgaacaggctcatcctcattctccactttagggttgctggctgttcgtttcaggttgctgctgagacttatgctggcagtggcatctgacttagagcgctggtgagtccttttggagggagacagccctgtgtcaggggccgggctcaaggagggcagctccctcttcctgtgagctggctttactcatctgagaggatcagcttccgtagcttggtcccacgggagtgtcgttgagtggaaatgtgcatgtctgaagaataggccccaagcaacagggcacactggagggaaaagttaatgctctggcggcaacggtggactatgtagggcttaatggcatcacccacgtcctca

SEQ ID NO: 5414 - DNA, 263 bp, Homo sapiens
aggatgtctaagctaatcccgtcacagaaaggaaacgcacaggcgcctaggcagaaacttggagactcaccgcagaggccacgtgaacccacggccacagagaggcaggacggcagagccatgatttcccaccgagcgattacgagaacctcttcccccaatagtagacacatctccaatacaaacacaggtttataataagtaataggaagtcaatataatatagattatccccagaaaaaaatcaacaatcttcaaacact

SEQ ID NO: 5415 - DNA, 461 bp, Homo sapiens
aattttacataagggacttgagaagcatggattttggtagccacaggggtcctggaaccaatccctcacagacacagacggacactttacagtagatgaacacaaagatgaaaggaaaagtctgacctaggtctgcggggagaagtggaactccatttttgacaggtgatgccattttttgttttggacatcgtccctctgtagttctttccattcccagtcttgcactctgaaagatacactgaaggaaagtccacacagtggtcaaagtctttcacaagacaccacgtgaaggtctgcacagcacagtcacattgagaaaaagatctcatgcaccagaccccctgtttctgctttctaaaagatcatcttttgcacctgcaaaaaggctgcagtaaactgggccattccatactttgattcatgtattcaatgctacttatgagctctctgtgtattga

SEQ ID NO: 5416 - DNA, 446 bp, Homo sapiens
ggcagcagggaggcctgggtgcgaacgatgttggcttggccttcacggtcctggagggaggtgaggctggccttggaagggtgccctggagaggtcttgggtgaaaacttgaccttgaagaaaccaatcacaaaagcggcgttgggtcagggctaggcttagaggtgaagcatcaacatggaaccatctcaggaagccgcatcgcctcttccgaggtcctcacttccaggagcctgtccttgcaagatgcaatcatcgttcctgctttttcattgtcattaaattctgtagaaacccattgtcattagctccaagtgtaaatttgggtcaaggagacagaataataatgggaatctcggagttcgacaccatagtgacgttcagcgtcctctgaattgtgctacatcagcgaacaagtcggcgcttgaattggattttgaggttat

SEQ ID NO: 5417 - DNA, 6336 bp, Homo sapiens
cgccgctcaggccctggagcggacggttcctactgcggctgggcaccggctccgctcccgcgtctgcccgcgctccagctgcgcctggcccggccccggcccggctcggcgtggccccggcctccaagcgaaggcgccgctgccgctgggccgctcccagggccatgaggaagcggcggcagccactgcggcccgcgtcaaggacttctccagacaggttatgttacctgcagaggctgccctgaagctccctgtggcctggagactatgtacaagaggaatggtctgatggctagcgtgttggtcacctctgccactccacagggcagcagcagctcggactctctggagggccagagctgcgactatgccagcaagagctatgatgccgttgtcttcgatgtcttgaaagtgaccccagaggagtttgctagccagattacattaatggatatacctgtgtttaaagctatccagccggaggaactagccagctgtggatggagtaagaaggagaaacacagtcttgcccctaacgttgtggcctttacccggaggtttaaccaggtcagtttttgggttgtacgagaaattctaacagcacagactttaaaaataagggcagaaatcctcagccattttgtgaaaatagccaagaaacttctagaactcaacaaccttcattctctcatgtctgtggtatcagcattacaaagtgctcccatcttcaggctgacaaaaacctgggctcttttaaatcgaaaagacaagactacctttgagaaattggactacctgatgtcgaaagaagataattacaagcggacacgggaatatatccgaagcctgaagatggttccaagtattccctatctaggaatctatcttctggatttaatctacattgattctgcatatcctgcctcaggcagtatcatggaaaatgaacaaagatccaatcagatgaacaatattcttcgaataattgctgatttacaagtttcctgcagctatgatcacctcaccaccctgccccatgtgcagaagtacctgaagtccgtacgctacattgaagagctccagaagtttgtggaagacgacaactacaaactgtcgctcagaatcgaaccaggaagcagctctccaagactagtctcttccaaggaagatcttgcaggtccctctgctggctccggttctgcgaggttcagccggaggcccacctgtcctgacacatctgttgctggcagcctccccacacctccagtccccagacacaggaagagccacagcctaggcaacaatatgatgtgtcagttgagtgtagttgagagtaaaagtgcgacattcccatcggagaaagcaaggcacctactggacgacagtgtcctagagtcccgcagcccccgaaggggcctggctctgacctcctcctctgctgtcaccaatggactctccctaggcagtagtgagagctcagagtttagtgaagagatgtcttcagggctggaaagccccaccggcccgtgcatctgttctctggggaactccgcagctgtgcccaccatggaggggcctctgagaagaaaaaccctgctcaaggaagggcggaagcctgcgctgtcctcgtggaccaggtactgggtcatactctcaggatccaccctcctgtactacggagccaagtccttgcggggcacagacagaaaacactataaatccacacctggcaaaaaggtttccatcgtgggctggatggtgcagctgcccgatgaccccgagcacccagatatcttccagctgaacaaccctgacaaaggcaatgtttacaagtttcagactggttcccgatttcatgcaatactgtggcacaagcatttggatgatgcatgtaaaagcaacaggcctcaggtacctgcaaaccttatgtcatttgagtaagtctctgcaggacgtggcatgacttcagaggcttctgggaacccaggctgggcctggtggtgaagagcagtcctgggcacaggctgtgagccagggtgctgggaaactcacagctggactcaggggacacggcctgtggcctcaccatcccagagggcttcaccagtgtgggatccacctgtcagtccccagcgactctcatgacactcattctgcagcaccgcctcttggggcagtggtcagaccccacacgccctctctgggcccaccacctgcatctgcgactagagagcacccggcccacgttgggttctcagtgctttctactgcacagagtggacagcgctaactaacctgtgagaggggcccgagagaaggaacagctgtggaacaggctttttacaccccaagtgcatggggttgctcgcccacagggctgcctcagattttgtacaaccccgaagcgtcctctgcgtgtgcgtgctgtacgtgtgtgtgtgtgtgtgagcgagtgtgaactcttcaagaaacatgcattttggcacaagactcgtgacatcacacacttcattcgctttgaggccctgctttaaccttaagttatagccctgtccaccgaggaaggtcagggtgagagcctagattcctcctgtgtcaagggtccctcgcattcttttactgtaaacaaacaatgccttaaattgtgtcttgttttctgttcctatgggtgctattcatctggaaggcctgcttccaggcctctttgctgtcagcccttctgagacaggacctggcttcaggactgtggactgggctgctggcctgcttgcttcctcccttccccattcctagcagggcctgaggccctcctcttctcgcccttcccaccatgccagaatgggaagttgtgacgttgcagctccaaccgacgtgctcatagtgatcagctgtgcaggagccatgaggcaccaacctctccccgcagggcaaagcctgtgcccccatcatctcactcctttgcctgcactgccagggtggggcccaccaagattcctgatcatgacgggaagctgagtgaccctgaggccttaagcttccccagtcttggccccaaatgcagtcaccagcaagttttccattttccaagtccaagggcacaattgttgatgaccgtgtgacaatagagcgaagccccggggagtgaacggtccaacctctgcattcagttaggagctcttcacatgaatcacatccttatctgtcaccttgtgtcacattttaaagtgacttttattttgcacaaataatttttattcagaataataaatcactctttatcatagtatcttctcttccctcttcccctttagtttggatagcctaactctgagaagttaacccttaaacagttttctggaagagactgaatttctgggtccttgcagctgtgatggtttcagagctcagactgatcaggcatcaagctaccctcaagagtttctgggctggatgtttcagaacaacatctacaccagtaaagtgtaataggtcagtttcaaaacgaccaaaagacccaccactgtattttgaccaaataatgacaacttctttagaaatttgaatggcttggtgaggaaagtagttgtcaccagggcctcattttgtagttgagccttacaatgcttagtagttcatcttctttttgagcaaagactagaatactttcctcctaagagaaactcccaggtgataaaagttgatgccatcaaaccttgacaccgggtgctctgcacacccacgcggatgttgcacctcattctcccgatgactattcaaatcagcatctagaggctgaatgacaatgccaaacactccacctctgatcagaaccatgcagtgttaacactttaacctacattgaatctgattctacctgttaacttttaaaaagtcgtaagtttggatgaaagtgcaagatgtggaacatcaactacctattttccttgggtttttccactctgcaaactgtcctggtttttcacaccaatgaagtattatagatgccaatccaaaacctcagaatttcaggcaccacaaaaacaggtaattttctatcccttataagtttgtcttttctttcagaaacatctcttagcctaatttgaaatagcacaatcacaattcaaaatgtttagtcttctcactaattgagtctgcttccacgtcctctcccaggaacattcttagctcggactcttgaagaatctctttagattttgttggcaaaagccttatagaagcagtaagaggcttgaccacgccggaagagtcctggagctaaagctggaagacactcagctctctaagcaggggctcggccaaacatgggagttaagtgctgcttgtcttcccagtgttggtttgaaccctgtgagcctgagacagagagggccaggcaccaaccacaaggcgggaaagtccatgggtagaccctccccctggagggaagcatttctagtttttgctccttgactgtccagagtgtacaaatgttcataacgccattgaagggattatttcttgcatgcatatgctgaatttttttaagcaaatggatcatggcaccccaaaatgaaagttatagaaagctgtctacaactgtggagttggtagctggtaacattgttgtctcaagaacaactcacctctctccctaggactaatttttgtctctctcagttgaacatgttttgtcattcaagatcagtcaggtgcattctggcaactgacatacttgatggaggattgattcggtagagagcagtagaaatcttgttctaactgtgcctggtgagagactttggccccctccctccctataaggctgtggaacctgaggaagtagatacttgaagagattctgtttaggaagaaactcactctcttttgccagttgaatttatagagcattttttttcttaccaagatggccagtatcattttacccccacctcccaagccccaagaggtgtaccttttcagatgccattttacaggcggaaatgctccatgaaacaggaagccacttgcaagcaacatctgctctgttcctcaggtggggcccagagcccttccccgagactgctgatgtctgtaaccactggggagcactgccaaaaatacagctttctggtttgtgagcccataaatgacttaaatcagctttacatcatttttacatatcaagtggtttcatgttaaaaaacaaactcctagtcctttagaaataacagattctctgcacaaaaccacccattcattcatttattcattcacagcactagcaagtgctgcctatgctgagaacaagtcagatctgatccctgccctcatggacctgaccactcaacaaacagtccccaccacacctatctccttaggcaagactttgcctctctcctagtcctgagtataaatcctgtgcatagattcctctagaaaggcatcaaaaggctcaacagactgaatggcctcttggtctgcgaaaattcagttgcaatgaggatgaagtcactatcctagaggctgcttggcccagaagagccaggcacagagctgcagttgggcacgccaaggattccaaaggtggaatgagagagtagggtcaaactgtcacagtatctgctccataggtttctgtttttaatttcaatgttaaatacaactacaatatgagcgagaactgcattttcttgggtgttgagaacttgtaccatggacttcagaccgccttgcagccgtatgctgcacaagcgtgtacaccccctgggcagcctcaaaaccccgcttacagcagcaacacaggagatcatctgtccattttagaaccattaatctctttatccattgctgaacgactgtgactattcagtaacgaagtaatagtaattaattagtatggtataatctttaataaatttcgtgccaaaatgcatggttttccacttagcattcaaaatgttgcatagagagtagttttcaatttcttatgtactcttcaaagtaagttgaaaatcagtttctacattttaattcgtttcctgttaaatctgttgcactctcctgggctgtctttttctccagcagacccctgcatgcagttgtgtaaggactttctctaattcttgtgaatcgtctcacccgcagtaaccactgaacgtcaatcagccctccatggggttctttcgatttttggtgaagtattttgttacctcagtcttgtatcaagttgctgtatttttcagcttgttacattgataataattatttcactaattaaatactttaatgtacaaacatctttgtttactttgaaattaaatgtgttttccaatg

SEQ ID NO: 5418 - DNA, 2116 bp, Homo sapiens
ggctccttacccacccggagacttttttttgaaaggaaactagggagggagggagagggagagagggagaaaacgaaggggagctcgtccatccattgaagcacagttcactatgatcttactcacattcagcactggaagacggttggatttcgtgcatcattcgggggtgtttttcttgcaaaccttgctttggattttatgtgctacagtctgcggaacggagcagtatttcaatgtggaggtttggttacaaaagtacggctaccttccaccgactgaccccagaatgtcagtgctgcgctctgcagagaccatgcagtctgccctagctgccatgcagcagttctatggcattaacatgacaggaaaagtggacagaaacacaattgactggatgaagaagccccgatgcggtgtacctgaccagacaagaggtagctccaaatttcatattcgtcgaaagcgatatgcattgacaggacagaaatggcagcacaagcacatcacttacagtataaagaacgtaactccaaaagtaggagaccctgagactcgtaaagctattcgccgtgcctttgatgtgtggcagaatgtaactcctctgacatttgaagaagttccctacagtgaattagaaaatggcaaacgtgatgtggatataaccattatttttgcatctggtttccatggggacagctctccctttgatggagagggaggatttttggcacatgcctacttccctggaccaggaattggaggagatacccattttgactcagatgagccatggacactaggaaatcctaatcatgatggaaatgacttatttcttgtagcagtccatgaactgggacatgctctgggattggagcattccaatgaccccactgccatcatggctccattttaccagtacatggaaacagacaacttcaaactacctaatgatgatttacagggcatccagaaaatatatggtccacctgacaagattcctccacctacaagacctctaccgacagtgcccccacaccgctctattcctccggctgacccaaggaaaaatgacaggccaaaacctcctcggcctccaaccggcagaccctcctatcccggagccaaacccaacatctgtgatgggaactttaacactctagctattcttcgtcgtgagatgtttgttttcaaggaccagtggttttggcgagtgagaaacaacagggtgatggatggatacccaatgcaaattacttacttctggcggggcttgcctcctagtatcgatgcagtttatgaaaatagcgacgggaattttgtgttctttaaaggtaacaaatattgggtgttcaaggatacaactcttcaacctggttaccctcatgacttgataacccttggaagtggaattccccctcatggtattgattcagccatttggtgggaggacgtcgggaaaacctatttcttcaagggagacagatattggagatatagtgaagaaatgaaaacaatggaccctggctatcccaagccaatcacagtctggaaagggatccctgaatctcctcagggagcatttgtacacaaagaaaatggctttacgtatttctacaaaggaaaggagtattggaaattcaacaaccagatactcaaggtagaacctggacatccaagatccatcctcaaggattttatgggctgtgatggaccaacagacagagttaaagaaggacacagcccaccagatgatgtagacattgtcatcaaactggacaacacagccagcactgtgaaagccatagctattgtcattccctgcatcttggccttatgcctccttgtattggtttacactgtgttccagttcaagaggaaaggaacaccccgccacatactgtactgtaaacgctctatgcaagagtgggtgtgatgtagggttttttcttctttctttcttttgcaggagtttgtggtaacttgagattcaagacaagagctgttatgctgtttcctagctaggagcaggcttgtggcagcctgattcggggctgacctttcaaaccagagggttgctggtcctgcacatgagtggaaatacactcatggggaa

SEQ ID NO: 5419 - DNA, 3233 bp, Homo sapiens
tgcgactgagtcggtggcgaagacgggaacgcgacgatggcggagactctgcccgggtcgggcgactcgggccctggcacggcttctctcggcccgggcgttgcggagactgggacgaggcggctcagcgagctgcgggtgatcgatctgcgggcggagctgaagaagcggaacctggacacgggcggcaacaagagcgtcctgatggagcggctcaagaaggcggttaaagaagaggggcaagatcctgatgaaattggcatcgagttagaagccaccagcaagaagtcagccaagagatgtgttaaaggactgaagatggaggaggaaggcacagaagataatggcctggaagacgattccagagacgggcaggaggacatggaagcaagtctggagaacctgcagaatatgggcatgatggacatgagtgtgctagacgaaactgaagtggcgaatagcagtgctccagattttggggaggatggcacggacggccttctcgattccttttgtgatagtaaagaatacgtggctgcacagctgagacagctcccggctcagcccccagagcatgctgtggatggggaaggatttaagaacactttggaaacttcatcgttgaacttcaaagtaactccggacattgaagaatcccttttggagccagaaaatgagaaaatactcgacattttgggggaaacttgtaaatctgagccagtaaaagaagaaagttccgagctggagcagccatttgcacaggacacaagtagcgtggggccagacagaaagcttgcggaggaagaggacctatttgacagcgcccatccggaagagggtgatttagatttggccagcgagtcaacagcacacgctcagtcgagcaaggcagacagcctgttagcggtagtgaaaagggagcccgcggagcagccaggcgatggcgagaggacggactgtgagcctgtagggctagagccggcagttgagcagagtagtgcggcctccgagctcgcggaggcctctagcgaggagctcgcagaagcacccacggaagccccaagcccagaagccagagatagcaaagaagacgggaggaagtttgattttgacgcttgtaatgaagtccctccggctcctaaagagtcctcaaccagtgagggcgctgatcagaaaatgagctcttttaaggaagaaaaagatataaagccaatcattaaagatgaaaaaggtcgggtcggcagcggttctggtcggaacctgtgggtcagcgggctgtcctccacaacacgcgctacggatctcaagaaccttttcagcaagtatgggaaggttgtcggggccaaagtggtaacgaacgcccgcagcccgggggctcgatgctatggattcgtcaccatgtcgacatctgacgaggcgaccaagtgcatcagccatctccacagaactgagctgcatggacgaatgatctccgtagagaaggccaaaaatgagcctgctgggaaaaagctttccgacagaaaagagtgcgaagtgaagaaggaaaaattatcgagtgtcgacagacatcattctgtggagatcaaaattgaaaaaactgtaattaagaaggaagagaagattgagaagaaggaggaaaaaaagcctgaagacattaagaaggaagaaaaagaccaggatgagctgaaacccggacctacaaatcggtctagagtcaccaaatcaggaagcagaggaatggagcggacggtcgtgatggataaatcgaaaggagagcccgtcattagcgtgaaaaccacaagcaggtccaaagagagaagctccaagagtcaggatcgcaagtcagaaagcaaagaaaagagagacatcttgtcgtttgataaaatcaaagaacaaagggagagagagcgccagaggcagcgggaacgggagatccgcgaaacggagaggcggcgggagcgcgagcagcgggagcgggagcaacgcctcgaggccttccatgagcggaaggagaaggcccggctacagcgggaacgcctgcagctcgagtgccagcgccagcggctggagcgggagcgcatggagcgggagcggctggagcgcgagcgcatgcgcgtggagcgtgagcgcaggaaggagcaggagcgcatccaccgcgagcgcgaggagctgcggcgccagcaggagcagctgcgttacgagcaggagcggcggcccgggcggaggccctacgacctggaccgacgagatgatgcctattggccagaaggaaagcgtgtggcaatggaggaccgatatcgtgcagactttccccggccagaccaccgctttcacgacttcgatcatcgagaccggggccagtaccaggaccacgccatcgacaggcgggagggttcgaggccaatgatgggagaccaccgggatgggcagcactatggagatgaccgccatggccacggaggacccccagagcgccacggccgggactcccgtgatggctgggggggctacggctccgacaagaggctgagtgaaggccgggggctgccccctccccccaggggtggccgtgactggggagagcacaaccagcggctagaggagcaccaggcacgcgcctggcagggtgccatggacgcaggcgcggctagccgggagcacgccaggtggcaaggtggcgagaggggcctgtctgggccctcggggccggggcacatggcaagccgcggtggagtggcggggcgaggcggctttgcacaaggtggacattcccagggccacgtggtgccaggtggcggactggaaggtggcggagtggccagccaggaccggggcagcagagtccctcacccacaccctcatccccccccgtacccccacttcacccgccgctactaagtcccactcgctgtgagttttcgggtgggcagacgcactgttgaatctggtagccagggttccctcgaacttgggggatctttttaaaagcaaagtaaatcctgccaccatgttgtagctcaatacaatgtgaactcacttttttttttttttttaataaatgtgttcttgttctgccatttttaaatcaaggtttctgttaacgaggcattccattttccattaataaagtttaccattcgcaaaaaaaaaatgtgttcttgttctgccatttttaaatcaaggtttctgttaacgaggcattccattttccattaataaagtttaccattcgc

SEQ ID NO: 5420 - DNA, 1195 bp, Homo sapiens
cgcgccggagcgggaccgacgggaccgagcgagcgaccgacgcgccacccgccgacgcctcagccgcttggggcccgcacggaccctctacttcagtgtagaatgagccaaggagactcaaacccagcagctattccgcatgcagcagaagatattcaaggagatgaccgatggatgtctcagcacaacagatttgttttggactgtaaagacaaagagcctgatgtactgttcgtgggagactccatggtgcagttaatgcagcaatatgagatatggcgagagcttttttccccacttcatgcactgaattttggaattgggggagatacaacaagacatgttttgtggagactaaagaatggagaactggagaatattaagcctaaggtcattgttgtctgggtaggaacaaataaccacgaaaatacagcagaagaagtagcaggtgggatcgaggccattgtacaacttatcaacacaaggcagccacaggccaaaatcattgtattgggtttgttacctcgaggtgagaaacccaatcctttgaggcaaaagaacgccaaggtgaaccaactcctcaaggtttcgctgccgaagcttgccaacgtgcagctcctggataccgacgggggttttgtgcactcggacggtgccatctcctgccacgacatgtttgattttctgcatctgacaggagggggctatgcaaagatctgcaaacccctgcatgaactgatcatgcagttgttggaggaaacacctgaggagaaacaaaccaccattgcctgactggctcttatcagtgttaatagcatctcagcttcctcagatcagttctatcactggcactacagaatccttctctttcttaaggcactttgcattgtagaatgttcctggatgttcatatctagtgtttgaaggggaggagggatttaaactggtcctgtacatagaaggtttgtttgacagaggagaaaaattagccaaggaagattgttgtttaaattcatttgaaaccagaaggggactttttagttgtatgtgtaacacattcattgaattattatcactgttttcttgggacaacatcaagcctaaatactgaacaatatgaagattcttttcttggcctttctgtggattatgtcatatataataattatcagaatcattctacttggctttttcc

SEQ ID NO: 5421 - DNA, 411 bp, Homo sapiens
  misc_feature (1)..(411): n=a,t,g or c
ttcagtggagtcccgctaccggcccaacatcatcctctattcagtagggtcgtgtctgngcttcctggggggtacggtgtggtccgccgactgctgcgagaccaccttcatcgaggaccggtcgcccaccaaagacagcctcgagtacccggatgggaagttcattgacctctcagctgatgacataaaaatccacaccctgtcctacgatgtggaggaggaggaggagttccaggagctggagagcgactactcaagcgacacagagagtgaggacaatttcctcatgatgcccccgcgggaccacctgggctnagtgtctttncatgnttttctgcttctngcctttgggatngagccttntacttntccatgaggtacctgattcgcaaantttgcctggggttcctt

SEQ ID NO: 5422 - DNA, 2754 bp, Homo sapiens
gaattccgccagccccgccagtccccgcgcagtccccgcgcagtcccagcgccaccgggcagcagcggcgccgtgctcgctccagggcgcaaccatgtcgccatttcttcggattggcttgtccaactttgactgcgggtcctgccagtcttgtcagggcgaggctgttaacccttactgtgctgtgctcgtcaaagagtatgtcgaatcagagaacgggcagatgtatatccagaaaaagcctaccatgtacccaccctgggacagcacttttgatgcccatatcaacaagggaagagtcatgcagatcattgtgaaaggcaaaaacgtggacctcatctctgaaaccaccgtggagctctactcgctggctgagaggtgcaggaagaacaacgggaagacagaaatatggttagagctgaaacctcaaggccgaatgctaatgaatgcaagatactttctggaaatgagtgacacaaaggacatgaatgaatttgagacggaaggcttctttgctttgcatcagcgccggggtgccatcaagcaggcaaaggtccaccacgtcaagtgccacgagttcactgccaccttcttcccacagcccacattttgctctgtctgccacgagtttgtctggggcctgaacaaacagggctaccagtgccgacaatgcaatgcagcaattcacaagaagtgtattgataaagttatagcaaagtgcacaggatcagctatcaatagccgagaaaccatgttccacaaggagagattcaaaattgacatgccacacagatttaaagtctacaattacaagagcccgaccttctgtgaacactgtgggaccctgctgtggggactggcacggcaaggactcaagtgtgatgcatgtggcatgaatgtgcatcatagatgccagacaaaggtggccaacctttgtggcataaaccagaagctaatggctgaagcgctggccatgattgagagcactcaacaggctcgctgcttaagagatactgaacagatcttcagagaaggtccggttgaaattggtctcccatgctccatcaaaaatgaagcaaggctgccatgtttaccgacaccgggaaaaagagagcctcagggcatttcctgggagtctccgttggatgaggtggataaaatgtgccatcttccagaacctgaactgaacaaagaaagaccatctctgcagattaaactaaaaattgaggattttatcttgcacaaaatgttggggaaaggaagttttggcaaggtcttcctggcagaattcaagaaaaccaatcaatttttcgcaataaaggccttaaagaaagatgtggtcttgatggacgatgatgttgagtgcacgatggtagagaagagagttctttccttggcctgggagcatccgtttctgacgcacatgttttgtacatttcagaccaaggaaaacctcttttttgtgatggagtacctcaacggaggggacttaatgtaccacatccaaagctgccacaagttcgacctttccagagcgacgttttatgctgctgaaatcattcttggtctgcagttccttcattccaaaggaatagtctacagggacctgaagctagataacatcctgttagacaaagatggacatatcaagatcgcggattttggaatgtgcaaggagaacatgttaggagatgccaagacgaataccttctgtgggacacctgactacatcgccccagagatcttgctgggtcagaaatacaaccactctgtggactggtggtccttcggggttctcctttatgaaatgctgattggtcagtcgcctttccacgggcaggatgaggaggagctcttccactccatccgcatggacaatcccttttacccacggtggctggagaaggaagcaaaggaccttctggtgaagctcttcgtgcgagaacctgagaagaggctgggcgtgaggggagacatccgccagcaccctttgtttcgggagatcaactgggaggaacttgaacggaaggagattgacccaccgttccggccgaaagtgaaatcaccatttgactgcagcaatttcgacaaagaattcttaaacgagaagccccggctgtcatttgccgacagagcactgatcaacagcatggaccagaatatgttcaggaacttttccttcatgaacccccggatggagcggctgatatcctgaatcttgcccctccagagacaggaaagaatttgccttgtccctgggaactggttcaagagacactgcttgggttcctttttcaacttggaaaaagaaagaaacactcaacaataaagactgagacccgttcgcccccatgtgacttttatctgtagcagaaaccaagtctacttcactaatgacgatgccgtgtgtctcgtctcctgacatgtctcacagacgctcctgaagttaggtcattactaaccatagttatttacttgaaagatgggtctccgcacttggaaaggtttcaagacttgatactgcaataaattatggctcttcacctgggcgccaactgctgatcaacgaaatgcttgttgaatcaggggcaaacggagtacagacgtctcaagactgaaacggccccattgcctggtctagtagcggatctcactcagccgcagacaagtaatcactaacccgttttattctattcctatctgtggatgggtaaatgctgggggccagccctggataggtttttatgggaattc

SEQ ID NO: 5423 - DNA, 2454 bp, Homo sapiens
ggaataggttagtttcagacaagcctgcttgccggagctcagcagacaccaggccttccgggcaggcctggcccaccgtgggcctcagagctgctgctggggcattcagaaccggctctccattggcattgggaccagagaccccgcaagtggcctgtttgcctggacatccacctgtacgtccccaggtttcgggaggcccaggggcgatgccagaccccgcggcgcacctgcccttcttctacggcagcatctcgcgtgccgaggccgaggagcacctgaagctggcgggcatggcggacgggctcttcctgctgcgccagtgcctgcgctcgctgggcggctatgtgctgtcgctcgtgcacgatgtgcgcttccaccactttcccatcgagcgccagctcaacggcacctacgccattgccggcggcaaagcgcactgtggaccggcagagctctgcgagttctactcgcgcgaccccgacgggctgccctgcaacctgcgcaagccgtgcaaccggccgtcgggcctcgagccgcagccgggggtcttcgactgcctgcgagacgccatggtgcgtgactacgtgcgccagacgtggaagctggagggcgaggccctggagcaggccatcatcagccaggccccgcaggtggagaagctcattgctacgacggcccacgagcggatgccctggtaccacagcagcctgacgcgtgaggaggccgagcgcaaactttactctggggcgcagaccgacggcaagttcctgctgaggccgcggaaggagcagggcacatacgccctgtccctcatctatgggaagacggtgtaccactacctcatcagccaagacaaggcgggcaagtactgcattcccgagggcaccaagtttgacacgctctggcagctggtggagtatctgaagctgaaggcggacgggctcatctactgcctgaaggaggcctgccccaacagcagtgccagcaacgcctcaggggctgctgctcccacactcccagcccacccatccacgttgactcatcctcagagacgaatcgacaccctcaactcagatggatacacccctgagccagcacgcataacgtccccagacaaaccgcggccgatgcccatggacacgagcgtgtatgagagcccctacagcgacccagaggagctcaaggacaagaagctcttcctgaagcgcgataacctcctcatagctgacattgaacttggctgcggcaactttggctcagtgcgccagggcgtgtaccgcatgcgcaagaagcagatcgacgtggccatcaaggtgctgaagcagggcacggagaaggcagacacggaagagatgatgcgcgaggcgcagatcatgcaccagctggacaacccctacatcgtgcggctcattggcgtctgccaggccgaggccctcatgctggtcatggagatggctgggggcgggccgctgcacaagttcctggtcggcaagagggaggagatccctgtgagcaatgtggccgagctgctgcaccaggtgtccatggggatgaagtacctggaggagaagaactttgtgcaccgtgacctggcggcccgcaacgtcctgctggttaaccggcactacgccaagatcagcgactttggcctctccaaagcactgggtgccgacgacagctactacactgcccgctcagcagggaagtggccgctcaagtggtacgcacccgaatgcatcaacttccgcaagttctccagccgcagcgatgtctggagctatggggtcaccatgtgggaggccttgtcctacggccagaagccctacaagaagatgaaagggccggaggtcatggccttcatcgagcagggcaagcggatggagtgcccaccagagtgtccacccgaactgtacgcactcatgagtgactgctggatctacaagtgggaggatcgccccgacttcctgaccgtggagcagcgcatgcgagcctgttactacagcctggccagcaaggtggaagggcccccaggcagcacacagaaggctgaggctgcctgtgcctgagctcccgctgcccaggggagccctccacgccggctcttccccaccctcagccccaccccaggtcctgcagtctggctgagccctgcttggttgtctccacacacagctgggctgtggtagggggtgtctcaggccacaccggccttgcattgcctgcctggccccctgtcctctctggctggggagcagggaggtccgggagggtgcggctgtgcagcctgtcctgggctggtggctcccggagggccctgagctgagggcattgcttacacggatgccttcccctgggccctgacattggagcctgggcatcctcaggtggtcaggcgtagatcaccagaataaacccagcttccctcttgaaaaaaaaaaaaaaaaaaaaacc

SEQ ID NO: 5424 - DNA, 922 bp, Homo sapiens
ccggctgcggcgatggaaccagcggacgagccgagcgagttagtgtcagccgagggccgaaaccggaaggcggtgctgtgccagcgttgcggctcccgggtgctgcagccagggaccgctctcttctctcgccgacagcttttccttccctccatgagaaagaagccagctctgtctgacggcagcaatcctgacggcgatctcctccaggaacactggctggttgaggacatgttcatttttgagaatgtgggcttcaccaaggacgtgggcaacatcaagtttctggtctgcgcagactgtgaaattggaccaattggctggcattgcctagatgacaagaacagtttctatgtggccttggaacgagtttcccatgagtaactgaggggaggggtactcagctccatctccaaagataaacctactccccacaagaactggcctttaatgtggtataactgttccgctgccttcttgtctgtgtgctaatataaatactgagtaccagcatgtccatttgaacatgcaaagggttaatcctgcttcctaaagcctcaagtacatgcctcctgcttagttcactttgtatcacatttcctaagctcccttttcccccagttttgggacactgtgcttacctccaaaaatctcatctcttccctggcattctccctaggctctgttttgcccagggctcccgctttttcttgctctagaggagcagtattcaaccttttagctatgatgacacataacaaaagatgtttatgtactaatagttgaaatctgcctttttctcattcaagaaggcatacaaatatctgagagtgactttgttgtatggctacccttgtgatctacagtaatttattctttctaaaagtaaagcattctcaaaacaaaaaaaaaaaaaaaaagg

SEQ ID NO: 5425 - DNA, 1234 bp, Homo sapiens; identical to SEQ ID NO: 3997

SEQ ID NO: 5426 - DNA, 446 bp, Homo sapiens
  misc_feature (1)..(446): n=a,t,g or c
attgattaaaaggtgacctttcttattggactgataagacaaaaatatagattccaaatctattgacatatgatatcacatccacaaatgtttgcctatttttgtagcattattttggttgcaaagtctcttagggaatgcacaaaaataatacaaccttaaaaatcagactagaagatggaatataagtggtttccttgtaatttttttttaagcttggagaggtaataacacatctttgaattcaaactgaggactgctgcttaatggtgcttttacagggtggttctaaaatttttgagagtcaggtattgctttctctgactgtttaattcaccactggcacgtgtttcctatcctcaagcataagtttaaaagattacaaacctcatgctgctcagttttttctntccagtaaatcagatgcatggtttctctagatttag

SEQ ID NO: 5427 - DNA, 644 bp, Homo sapiens
  misc_feature (1)..(644): n=a,t,g or c
tggaagaattgattttaaccttttctatgcaaacacaatctgaaaagttatgtgctgcatattgtgctcaaaatgttttatactctccacaagctgcaattaagagattcattcctatttttaaaatttagatccacatgggttagagaaaaatactctcaaaagtgagttcctagagaatattatccctttgcctcacagagattttaacctgcatttaagagtaagtgttaggttgaggcatatgatattgtcgcttttgcagatcagcaatggttgaacactggcaatttcaatatggttcaaccttgcacatgactcaagtgtaaaanaaggagaaaccttcaagtattccttatttcttccaatagggggtacactttttttggtacagtggagatccaacccaaagtacgcaagcctcttctctcccctgatggtgggtagctacaggcagttacantcccttggctgcctgtgagaagcctacantttggcattttcctcccnaaaattaccacggtngaccaagtgaacattnccagnatatngacctgggtaatgggggggaagggggagttgagcaacnggtggaaatattttacngggatttccaacatanggcagcctttaagggaatttta

SEQ ID NO: 5428 - DNA, 523 bp, Homo sapiens
  misc_feature (1)..(523): n=a,t,g or c
gggggaaattactttaaaaaagaaaaaaagaaagaaagaaaagcagaaagtggacatcgaccagcacctgtgtacgtacagtacaccttgcagccgaatgcaaggttacttcatcctatggtaaaggtcgcccccagcccggtagccagagatgccactctttctgcccagctaacaccattgtgcgcctgtgtgcgagtggtgccagcataacctcaatcacaccaatattgctgccaccactgctttactggctccgactgaacacagcatagaagagtcaggagagaatgcacagctgtacacccaattctgatgccccctcaatactttcatcatgtttccatcatctttcaggtcccatactctgagagttttgtctcttgaagctgacaccaggatcaagttccatctggagcaaaagttaaattctgaccacttcagtatgattaccaagttaaggaggagtttctgtatatcatcccatattttgatcgccattgttcaacctgtancaagagta

SEQ ID NO: 5429 - DNA, 746 bp, Homo sapiens
  misc_feature (1)..(746): n=a,t,g or c
ttnnncgggagnaacacaacaagccgagtccgccgcccctgcacaacaacaacaacaactgcgaggaaaatgagcagtctctgcccccgccggccggcctcaacagttcctgggtggaactacccatgaacagcagcaatggcaatgataatggcaatgggaaaaatggggggntggaacacgtaccatcctcatcctccatccacaatggagacatggagaagattcttttggatgcacaacatgaatcaggacagagtagttccagaggcagttctcactgtgacagcccttcgccacaagaagatgggcagatcatgtttgatgtggaaatgcacaccagcagggaccatagctctcagtcagaagaagaagttgtagaaggagagnaggaagtcganggttttgaagaaaagtgcggactgggtntcagactggtccagtagacccgaaacatccaccccaaggagtcccacttcaganaccctaacgtcttgtgttttttaggatgatggatcagtgtncgtgtntnnnnnnnnnnnnnnnnnnnnnnncnnccnnttttgtnnntnnnnnnnnnntnnnnnnntntnnntnnnntnnntnntnnnnnnnnccnnnntnnnntttnnnnnntnncntnntntnntnnnnnnttnttnntntnnntnttnntnnnnnnnntntncnnncttntntctnnncnnnnnnnnnnntnnttncnnctnntnnnnnnnntnntnnct

SEQ ID NO: 5430 - DNA, 448 bp, Homo sapiens
  misc_feature (1)..(448): n=a,t,g or c
ctcagattcctggacctggtgtcctggttgggtccaaggtgattttacagaagaaaaaaacaactcaagcattctggtggcaacatagagattgtaggctgcttctaagaaagttattaacaatttggaaattcctaagtaggatgagagttagtaactggatacgagtgaagtttatatccaagttcagactcaaaggcattattatgatttgcttcttcccatgtcttccatgtcctgcttctcaaagtttttctcatccatcacactactgccttaacctgctctgagtatgcatttgttttcaattcatctttatttcaatctgtttaacttttgaatccgcatgggaatacgcacattaagttcctttctaaaataaggttttatggaagctngagtgagtttcacgataagtgtccttgctattttttgagatgttttatgg

SEQ ID NO: 5431 - DNA, 1650 bp, Homo sapiens
agcgagccgccacggtatgaccccaggggctctgctgatgctgctgggggcgctggggccgccgctcgccccaggcgtccgcggctcggaggcggagggtcgactccgggagaaacttttctctggctatgatagctccgtgcggccagcgcgggaggtgggagaccgtgtcagggtcagcgttggtctcatcctggcgcaactcatcagcctgaacgagaaggatgaagagatgagcacaaaggtgtacttagacctggagtggactgactacaggctgagctgggaccctgcggagcacgacggcatcgattcgctccgcatcacggcggaatccgtgtggctccctgacgtggtgctactgaacaacaatgatgggaattttgacgtggctctggacattagcgtcgtggtgtcctccgacggctccgtgcgttggcaacccccgggcatctatcgcagcagctgcagcatccaggtcacctacttccccttcgactggcagaattgcactatggtgttcagctcctacagctacgacagctcggaggtcagcctgcagacaggcctgggtcctgacgggcaagggcatcaggaaatccacattcatgaagggactttcattgagaatggccagtgggagaatatccacaagccctctcggctaatccagcctccaggcgatcctaggggagggagggaaggacagcgccaggaagtcatcttctacctcatcatccgccgcaagcctctcttctacctggtcaacgtcattgccccatgcatcctcatcactcttctggccatcttcgtcttctacctgccaccagatgcaggagagaagatggggctctcaatctttgccctgctgacccttactgtgttcctgctgctgctggctgacaaagtacctgagacctcactatcagtacccattattatcaagtacctcatgtttaccatggtcctcgtcaccttctcagtcatccttagtgtcgtggttctcaacctgcaccaccgctcaccccacacccaccaaatgcccctttgggtccgtcagatcttcattcacaaacttccgctgtacctgcgtctaaaaaggcccaaacccgagagagacctgatgccggagccccctcactgttcttctccaggaagtggctggggtcggggaacagatgaatatttcatccggaagccgccaagtgattttctcttccccaaacccaataggttccagcctgaactgtctgcccctgatctgcggcgatttatcgatggtccaaaccgggctgtggccctgcttccggagctacgggaggtcgtctcctctatcagctacatcgctcgacagctgcaggaacaggaggaccacgatgcgctgaaggaggactggcagtttgtggccatggtagtggaccgcctcttcctgtggactttcatcatcttcaccagcgttgggaccctagtcatcttcctggacgccacgtaccacttgccccctccagacccctttccttgaagactggagggttgagaccaggccccctgccagttgaagtgagagagtttggtgatactgtcaagccctatccttctctgcctcttaactccttcacgaggaatctgggcctcttatttcgttctggg

SEQ ID NO: 5432 - DNA, 983 bp, Homo sapiens
cgcaggggtcccccggccgccgcgatgcagaaatacgagaaactggaaaagattggggaaggcacctacggaactgtgttcaaggccaaaaaccgggagactcatgagatcgtggctctgaaacgggtgaggctggatgacgatgatgagggtgtgccgagttccgccctccgggagatctgcctactcaaggagctgaagcacaagaacatcgtcaggcttcatgacgtcctgcacagcgacaagaagctgactttggtttttgaattctgtgaccaggacctgaagaagtattttgacagttgcaatggtgacctcgatcctgagattgtaaagtcattcctcttccagctactaaaagggctgggattctgtcatagccgcaatgtgctacacagggacctgaagccccagaacctgctaataaacaggaatggggagctgaaattggctgattttggcctggctcgagcctttgggattcccgtccgctgttactcagctgaggtggtcacactgtggtaccgcccaccggatgtcctctttggggccaagctgtactccacgtccatcgacatgtggtcagccggctgcatctttgcagagctggccaatgctgggcggcctctttttcccggcaatgatgtcgatgaccagttgaagaggatcttccgactgctggggacgcccaccgaggagcagtggccctctatgaccaagctgccagactataagccctatccgatgtacccggccacaacatccctggtgaacgtcgtgcccaaactcaatgccacagggagggatctgctgcagaaccttctgaagtgtaaccctgtccagcgtatctcagcagaagaggccctgcagcacccctacttctccgacttctgtccgccctaggccccgggacccccgcctccaggctgggcctggcctatttaagccccctcttgagagggtgagacagtgggggtgcctgg

SEQ ID NO: 5433 - DNA, 454 bp, Homo sapiens
ttttttttttttaaagttaactattttaattagaatttttattttgtgcttcagggccacaggataaaataactacatttagcttgcctttcagtgacgcttttgccaaatgtcagctacaaggagtcatctccctcaccgccaagctgtctagcagccagagtggtagctttactgtaacacacagtactttttgtaatcagactcaaagtcttcatccatactgcttgtgtctgccatctttttgccatcagtctttggcagaaattgtgcatagtctatcccctgctgctcatagaaaagaatgtaggcagagtcggtgtcaatttcatccgggtgaagttcctttacagctgctgtcattgtaacagtaccacttgcagtttgggtttttggcataagtgacgtaatgggcccccacccagaattccccgaatggcacgaaattggcata

SEQ ID NO: 5434 - DNA, 552 bp, Homo sapiens
  misc_feature (1)..(552): n=a,t,g or c
ctcccagcagttcttagcattccactcaagatggtcaaggatggggaaaagggcctttgctggagttgccagctagaggcattctcaggtagctaggtgtagtgtattttggtgcctctggtctctggggcaatgtcttttgtcctccaactgggtatgtatggatactgtgattccaggtctgttttttgacttaagaactgctcccagatttccaaatggaagttttcacactatgacctagaaatgaatagatatacattctgtcttgggtttcctaagccagtctcctataaaacaaaaatttcatcccaggaactcttccatataagggaacatatatgttttgaaaataattcatccatttctttgctcccataaataccttttgcccaggatttattcaaaaaaaaagaaagattgctacttaatgtttctattccattggagtgagtgatttattcattggaggtctaagtgatgatcatagaaagaaacatagagtactagaactggaaggaactaatctcnattttataggactctcgtgcc

SEQ ID NO: 5435 - DNA, 545 bp, Homo sapiens
  misc_feature (1)..(545): n=a,t,g or c
actgttgacctgtcactgtttattatttcagcactaaaactgaggagcctcaactgctggctcttcttccctttgtatttgtgtaaggagcactgcactcccataaaaggttttaaaatacaaaatgtacaagaacacacaattccaagtgctgtaaacataactgagaaccagttcctttactaaacatccattttataaaatacaaggtttcaatttgagcccatctgagccttaaagatccattctgaataccaaaaacagggcttcacagccaggcccagaagaggtctggtgataatggctggccctgggtggggatagtttacacccgggcagcagcaccacacatgaacccaaagacatgttctttttaaagctgttttcagccatgtttctctggtgcatctccagtaagcagaaggctacccattccattcctcaaccccaagagctagcacagttagagtaggaggggggtgcgtactagcacgtgnccagttgctcagtgcggcaggtagaaatgatttgcataggtccatggg

SEQ ID NO: 5436 - DNA, 384 bp, Homo sapiens; identical to SEQ ID NO: 1706

SEQ ID NO: 5437 - DNA, 168 bp, Homo sapiens
ttttttttttttttttttttttttttttcaaaacaagtgttatttattataaaatcagtggcttctgattagaagactttttttttttaaaccaaataggctcaagaagctggctggaggttgaattggctgacgaacatcttcttcctccaccagcagtttgtggga

SEQ ID NO: 5438 - DNA, 175 bp, Homo sapiens
gcaggctgatacatgtgggggattttatttcaggcacttgctcttcagtttttcttacacgatgttccacaaatataaaaatgagaaactctttcagattatctgtatatctatatacctggattattctggctaaagcgacaggaaatcccagcagtctggcttccccgagtaa

SEQ ID NO: 5439 - DNA, 246 bp, Homo sapiens
ttttttttttttttttggaagaaaaggaaggggtttattctcaagcgtctaagggtttacaaacgagggcattttgttttaaaaaggggcagggcgacactggcggcctgaggaggggtccattggctggtgggctggccgagccaccctcaggcccctgcccacccggtccgccctctgcctggtccagagggatggctggtgacgaggggggaggtcttgggagaggctgggaggcaggagaga

SEQ ID NO: 5440 - DNA, 263 bp, Homo sapiens
aaacaataaacagaatttattagctcatataacaaaaaaagtccagaggtaaggccaatctcaagcaaggcttgatcctgtacttaaacaatttcaccaaggacttgatctctttctgcctctcaactctcccttcagtggtgtcagcttcacgtgattcctggtcatgatcccaaggcccaaggtggtcatcataaagacccaggaatactactacctttttcacattcaacaggggaattaaaacagcttctacccagcat

SEQ ID NO: 5441 - DNA, 394 bp, Homo sapiens
ttttgtcactctgttcttccatgcctttattggtaacagcaatggacaagaacaataccaggcatagcagacaccctagcccagtacctgaggtgccaggcaggccctgaaggcacttggcacatccagtcccagcccaagatccagtctacccaggccatgtccccgaatggcaggaggcgtctgtccagtttgtatgtgtggatcagtctctctgagtgtctgagccgctgcctgcagggcccccccattctccgcacatggtaggggctgttaggaacatagcgtggcatcccccggtggaccactgggccccagtgctgaccatggggattagggccagggattggaggtggcagagggccaggcacaaagttcactccagggccacatc

SEQ ID NO: 5442 - DNA, 303 bp, Homo sapiens; identical to SEQ ID NO: 961

SEQ ID NO: 5443 - DNA, 280 bp, Homo sapiens
  misc_feature (1)..(280): n=a,t,g or c
gaacaaaacagaatgttattttattttgtgtctaagagtacaaaantcataatcaccaacctcttgggaatcccaaggcaganttttagtcccagaccccccaacatcctcactacatacatggaagttgctttactcctttctaccttagttatttgacctataattagaggataaaatacaacattctaaaatcctggtaatatggccgatatataattttatttttgatgtgggtgagagtcttgaagtctggaaagcatttaacttattaaaagac

SEQ ID NO: 5444 - DNA, 495 bp, Homo sapiens; identical to SEQ ID NO: 4695
  misc_feature (1)..(495): n=a,t,g or c

SEQ ID NO: 5445 - DNA, 402 bp, Homo sapiens; identical to SEQ ID NO: 2857

SEQ ID NO: 5446 - DNA, 463 bp, Homo sapiens
  misc_feature (1)..(463): n=a,t,g or c
ggtanngatcngtgtatttataatcaagttgaatcaagagtgacaagaagaaatacagctagagttatatttttgccccaggggtattcttttcctagaagagcaagtccatttttagaaaatttaaatgtctttatttgttactttccaaatattttggttaaacaaatatctcttgcaaatgtatcttcaaaatctttgcctacatgcatacaatttgttcttcccaactgcttaggggaaattccttcaaaatgcttagggagttctaacacatcaaatctgatcattttgtttacattagggaaacaccaggacattgtgggatctcttctttaaaaaaacaggatttttattttactggcattttcaccctcaggacatgtctcgtaaggtntgaggggttaggctaggnaggggggngggttccagggcaacacatttaccaaatggacncccgggg

SEQ ID NO: 5447 - DNA, 466 bp, Homo sapiens
  misc_feature (1)..(466): n=a,t,g or c
aaaaattgtaaaattaaggtgaaataattgggaatataaaaccccaatgtaagataaagcaaattgctttattatttttaaaaatgaagagaccccaaatacaganttaagcagtaaaaatcttttgtagttctttcattaatctgtatgatccaaactcaagtacgtaattttttcttttttaagaggcaggttttgctttgttacccaggctggagggccatggcaccaccacgcctcacggcagcctccacctcatgggcatcaagtgatccttctgcctcagcctcccacgtaggcagggaccacaggcggaanacccatgctcagttattattattattatttttaggagacaggggtcttggctatgttggcccgggnttgtcttaaaactncggggctcaagtaatccttccacctcagtnttcctaaggtacgtaatatttttaataggcaaaccatt

SEQ ID NO: 5448 - DNA, 385 bp, Homo sapiens
  misc_feature (1)..(385): n=a,t,g or c
anncccagataagtgtgcaattatggagaagtttatctgtaagaacagataaagggaaattgtctacacatgtgcatgtagaaagaaattatggagatggattcagccctcaaagcaaaagctctatttaatttgaatttttacttaaatcaaaagcagaaaatttaaattgtcactaatcttaactggtcaagggcatgatgcatcagtctcataacctgggcaaaaacctgcccttaaatgatcaggtcagaaccagtaagagtctctatcctgggtcctcggtaatacagagagctcccaaatnaaattatatgtattacagagccaattcagcccaatntacagtctctgattttcacatggcctacacaaactttatgtt

SEQ ID NO: 5449 - DNA, 372 bp, Homo sapiens; identical to SEQ ID NO: 1745
  misc_feature (1)..(372): n=a,t,g or c

SEQ ID NO: 5450 - DNA, 463 bp, Homo sapiens
  misc_feature (1)..(463): n=a,t,g or c
cttttcatatttcaactttatttaaaatatgaggttttatgtccagaagggagggcagttgccatcggaaggtgaagtgaggcacaatactattgggttgcgggccaagtacacagggttgcactgtgaaggaactgaggaggttctgggagggcctggtgacaacaatggatttggggagatccacaaaggaaattttcatttcctccccaggttagctattcagtgggtggattattcagtctttttaagcaaggtcactgctccttagcaacatcaacaaaagtgccaaagctgaggacacagagaataccatcattgtcttttgtttctctttatgcctggatggggaaaggaatggaaactaatagcagaaaatgaaacatttcnggatgttatcccttgccatgaagaatcacgggcttgtgtagagacctctttcctttcntttttttttttgagg

SEQ ID NO: 5451 - DNA, 468 bp, Homo sapiens
  misc_feature (1)..(468): n=a,t,g or c
catctctccttttttctttggactttcctgagaccccctctccttggccagccggtgtctgcatcttgcagctctttcagctgtaatccactgttattataaggagccctgttgctgtggtggtaaggagtggggaagggaagcattccattttcttaggattacatctcaatcttttggntgggcctatgttgctgtactgtgacctttacaaatgtttcttaacctttttcctccttccttaggttgacacagggaatctaggagggtgactcgagtcagaggaactatcttctccccaggatgggggataaggactctggggtaaaggcccttttccntggggagaggtaaggtctttaatcataggggggaacatttctgagggcgcactttcaaagggcatttacntttccccttnccctttnccagagccnggggggaaggggtntatcttnggggtctttt

SEQ ID NO: 5452 - DNA, 496 bp, Homo sapiens; identical to SEQ ID NO: 2182
  misc_feature (1)..(496): n=a,t,g or c

SEQ ID NO: 5453 - DNA, 438 bp, Homo sapiens
  misc_feature (1)..(438): n=a,t,g or c
ttttttttctttataagtgctttaattaaaaccaatcttattatgaaaaacaaaccaaaaaaaccttgcattgatggatggtagctatttgcaatttcttgttttggctggatgcattgaaggattaaaaatttaatatttaaggtgtgccttaaactgcaaggttccctgattttattctcatctaggaatttttgctgctttaggtagctgacaacatgcagatccatactctatctcttaagattttcttttgggaactgattccagggtgaaattttcttaggggaaggatgtgggctaggaggctggggtatggcaaaggcatgttctataggcaagggaaaggccaggatggaggtgagggggtcaaaaatctaggttattaaaattttagggggngacactngggttttaaataaacntatttcttcccac

SEQ ID NO: 5454 - DNA, 371 bp, Homo sapiens
  misc_feature (1)..(371): n=a,t,g or c
ctggagcnnttntnnttttatttgctcaatgaaaatacttcgtccttttttatcagcaatacatatagttccaacaagaactattcatcacaaactgccagcctggggatttcttcatgaaatattttgtatttgcttggtacatggttcaaggaaactcttgtgtttgtgccaatcagggaaataaactgaacaataaacgacactgaaatagagtattaggcaatatgtagctttgtttttgctttttttttttaaaaaaaaaccactgaatttttttccacccacaaacacatgggaaagtgcaggaaaccagttaatctatggtgatggtatttgccatacggtttacaaacnaggccaaattaaaa

SEQ ID NO: 5455 - DNA, 353 bp, Homo sapiens; identical to SEQ ID NO: 2209

SEQ ID NO: 5456 - DNA, 429 bp, Homo sapiens
  misc_feature (1)..(429): n=a,t,g or c
agctcacgggcggcaggcagaaccttccttttagtgagttgtaaagtcagagagaagctgaaaaattagagtgagaccacttattatttaatgatttttaagagcagggtcacctttaaaccagaattggcttgaaaatggagactgtgatatgcacggctaaaataagggaaatgtccatttgaactgagactagaaagcatgactttgcattgcagctggctctgttgataaaaatccctcatccctttgagtgttaaattgaaagactangaaagcatttccaaggcgaagtgcttcatgnctgtctctcaggnttcccacagctgggtcccggggcatgcctgttctggatgctctncattgcgagggaaactgccnttcacccntagctcgtaatcccagctnctcgggggggtcgagggcagg

SEQ ID NO: 5457 - DNA, 203 bp, Homo sapiens
  misc_feature (1)..(203): n=a,t,g or c
actttcttgaatttatttttatttcaatggttttaatgaatatttccgagaaagttcacaatactcatttttatgtttcaatttatattcaaatttactcaaagntaatatcacccggtattattagagaagtctctctaaatactagaactgacatttcagatccntttgtaataatactgcccccataaaatatgcatagg

SEQ ID NO: 5458 - DNA, 319 bp, Homo sapiens
tttccagtataaattatttttaattttagaaactgagattgaagtacagtttttagtttaaaatattaaaaatgaaaaaacctttaacattattaaagatgtgttgttacaaagttcctagatatatacatgtacaaaacaaatagatattactatctgacacctcaacccatgacttaccctaaatctcctgatatgaacaattaatctactgggaggcttttcccaataagtttcaaatttcttgcacaaagatttgctgccattcatattctgtgcatggatgaggacatttaatcacagactatttcaacttaat

SEQ ID NO: 5459 - DNA, 276 bp, Homo sapiens
tttttttttttaggacaaataaaatttatttttctctgtaaattcatttaaaagtatgttatctatgattatcctatcaaggtcagaaatgttagatcttactccaagataggtaaacagccctttgaaacgcaacaaaaagagacgatgatcttatgagctcatttatgttcatgcgtgaaagtgtgaagatcactagctttgctgtgtttctacaagtttccttgactgtaaaaacagtcaaaatgtaaccaacctaattcaagatgttaaatt

SEQ ID NO: 5460 - DNA, 549 bp, Homo sapiens
  misc_feature (1)..(549): n=a,t,g or c
tcctngcnngggtcgttactgttcattaggggagaaagcagtttaaaatgtctcagcctctcgcctttcctccaatcaacacaaagtatattagacaaagtggataaagactggcattgacatcttccaaatagcaaaatcaattttataatttaaagacaaaaaatgctttaactgcagagggcatttaagacgtttcacacttacagggctaatgaaatgcaggactagcataaaagttttttggggggggtgggggagaatagattttttaacataaggagtcgataggnaatctttaataatttttcccccccaaataattttaaggtgctttaagggccgcgggatcncggggggggtttccccctctttttaccttattatggantttaccatattcctnaaaaatggatttaaatccccattnccccttcaggccncaggggggnaaggggggaaatttgctgtgggggcccctttntttaggggagggtttcctcctccaggcngctcctctttaccgnccccgtccggtttcgggccctg

SEQ ID NO: 5461 - DNA, 378 bp, Homo sapiens
ttttttaccttttggcctgaatttttttttaatttttaaattaaacaccaacgaaaacctcattttgtctaagcagattgaagagaaaaaatgagctatactgatagaagctgaaaaaagaaattactgtctacacgactaagaaaaagaccaagcaagtgcaatgagtaataagttatagaaatagcagcaactccacaagaaactgataagcatctgccactatcaactctatgctagatgccaggcatacagtgaatgtgatgtgcccacttcattcaagaagctcatcaggtgggaagaccaatgaggtatcagtttaaggtatgaggatgaattttataggaaagcaggcatcccaaatgttcccttatttcc

SEQ ID NO: 5462 - DNA, 307 bp, Homo sapiens
ggtcatgctctgttgcccaggctggagtatggtggcaatatcataggttcactgtagccttgaactcccgggctcaagtgatcttcctgcctcagccttccaagtagctggcactgtgtctgacaaagttcacaactttgtttgtggtcacaaagcttttcagcaggaggcagctatttttggtaccttgctaagatctagtatatcactatacgagaccctacaaaaacacacaaaaaagcaattcctcatttactatgttcaaggaaacggcatggaaataaaggtaaatttttagggcaaaagg

SEQ ID NO: 5463 - DNA, 290 bp, Homo sapiens
caagatctctattggctttgctttggttcctgtttcccccctaaaaaaatctaacttctaaaaacattctgctcagacaaccatttcaagttataggacacatgctctaaaggaaaccatccaggagaaacatttgcacaagttctcctatgacttgagattgcatctgagaagggtgcagggggagaacagacagaaacagcccactctgtgtgcagaacgccgtgtgtcctcagtgtttctcggggcccatagctcattagctgcagttggtatgaagcctgcaacct

SEQ ID NO: 5464 - DNA, 246 bp, Homo sapiens
  misc_feature (1)..(246): n=a,t,g or c
cacattttcaccattttattcattaatgttgtcagatggtttagtggggcatgtggggaaagaagggtaggagttgtccccccatccccgtgcacaggtcaggacatgctgggggctcctggagggagaggaggatggggtcagcctagcccctcccaccccagatttntgcgagggcccccaggatggagggtggtggggggatgggcagacccttcagtccagggtagggaagctgagattata

SEQ ID NO: 5465 - DNA, 344 bp, Homo sapiens
  misc_feature (1)..(344): n=a,t,g or c
gcttgtncaggttctgtttattatgtnctcacagccttgtttatagtaaaggtgaatgacatgattccactttacacgataatgaaaaaactcaatgaggactccatcagccaagcggtttatatggcagatgagctgctacaaatctgttgtgtgctcgccgcgtgactcagctaatgctaccggggttggagcgcacaccgagcccagccaccttttccatacctggcagagggaagggagtggaaggaccagaagggagtaagantcaggaaaggaacagtttattgaaaggacccagagcccaacctaggaaggccagtggcccatcctgaaatctctca

SEQ ID NO: 5466 - DNA, 162 bp, Homo sapiens
  misc_feature (1)..(162): n=a,t,g or c
cagaccctcctttatttcctgancgatgtcacagcagccgtaaaagaaaaccagatgaccccaaccaacctggccgtgtgcttagcgccttccctcttccatctcaacaccctgaagagagaganttcctctcccagggtaatgcaaagaaaacaaagtttg

SEQ ID NO: 5467 - DNA, 451 bp, Homo sapiens
  misc_feature (1)..(451): n=a,t,g or c
gcagaggcctccactttttatttcagttgtactcatctgtcccactgtgcaaatggagtcacacgctcactcaattctgagaggcctggcaagnaaagagaaaagatgcccagagcagtctgttagagttgcattctcagactaatatctttacagtcttgagaaatcactgtcagggtttatttaaaatgcagatttttgaaggataaattttacgactaattttttttaataaactatgcaggattgttatttagaagatttgccaaatttagagtcttcagcgatggaaataattggccttcttgtcacagtcttctgtttataagtgggtaaagaaagttttctttccagaaaaatacagcagaaaatccgatggttctgataggagttaattgtggagatgtgccagagacagcagcttcgtggatggtgacaccacaatgtctgt

SEQ ID NO: 5468 - DNA, 306 bp, Homo sapiens
  misc_feature (1)..(306): n=a,t,g or c
gcatgtattcttcaattcagggtcctggtaatcactggaaccacaagttcaaatgccatctagaccataaggactcttataaaacacaaaccacttcatcatcaacaaacctatttgcctactagaacttttaaagcaaggctgcaaactattcaagtaaacaaccttgtggggtggttgacatggaccgagagctaacaagagaacactggaattagcttctcagtttcaaaatanggacctaaaggagtttgcgctataggagaagagttgcttgcattttgttttaatgggaaataaattttg

SEQ ID NO: 5469 - DNA, 443 bp, Homo sapiens
  misc_feature (1)..(443): n=a,t,g or c
taaacgagatgtttttaagaagtgacaaaactacttctaagttcttcattttcctagttaggacaatattcacaggaaattgaaattattattctaacacttaaagtgaaatcactgaaactgttttcatttacctgaagattttaacaaacaggggcatgcaggacagagtacctcagcctctgtaaatgcctggaacaccccaactcccaaaggaaggcagagcaggtgcacatttccagagaggaattgcaaaggatgcccacagaaacaggtaattcattaccagagaaaagtccctgatgttggaaatctcatggctgaaggcagaaactcaatccgggtagaagctnagtcaagttaatccanatggaagcaacttaaattagcttttcttttaaaagagacacctagactgggtcccactcattacctgccatatt

SEQ ID NO: 5470 - DNA, 423 bp, Homo sapiens
  misc_feature (1)..(423): n=a,t,g or c
ttgcaaaatcaaaaattttttattccaaatacaatattctttccaccacacctcggctgcaaggcattttgtagagaatctgtctggggagagggatgggtactggaggcacatccggggcaggtaggagacctggtggccaagactgggatggggtggcaccatgggggtatcgaggacgtgcatctgctccagctccatgtggcggtanancngcngcancngcnggggctncangctcnngaacnccntnaanttgttctcggcgaactctcgaactcgctgtgcacagtggtgggggtnnaaatcccagtaanggtcgctatngctctccccatcactngctgagataatgggtaatactcgtgcgttttngcgtttggtataaancccngtcataagggcaccangtctttctgatgg

SEQ ID NO: 5471 - DNA, 436 bp, Homo sapiens
acactccaagcactcacaaatggctttcacaaacacttagcctaggctggaacacaaaaggatatcacaacagagtccattgggttttacttgcttacatcaccaaagaatgttcatggcagttaattttcaggctgtaaaaactacatctatggcaccaacatggaatttaaaaacaagttggatttcaaagtaccccaaatgccaaaaactgaaagtactatcaaacgggtctccaaagaagtctaggatgctgtgatgcaggcctgtccatatacctccctggaccctcaggtgctacctacaggcctctgctcatttcccataaacattacctcaccatcccaggacaacaaaggaatgccatgtaagaaacaaacaagactggttatctcctaccacaaacaggaatacagaaaacatggggccagattcg

SEQ ID NO: 5472 - DNA, 461 bp, Homo sapiens
acaacagcatcaaatatccagggaactttatttttaaaccataaatcaaacagacacaactttcattgacccaaatatgcataatccaacctgaatataaaatgcactgaataggtaaattacatgatacaaagggaatgtaattttacaaatgtgaaatgattgatggctacagcaatttaacaaaataattaaaacattgtatgtttaaaaacaagaatatcttaaagccaattatctatagtaaaccaagggaaattctggtatggaatgatttgattcaaaggaaataaggcacctgctataaatttagagaatatctttcacttttaaagttatagtaaaatagaattagttaaccaagactggcttcagagggaaccaagttcagggattcacttacagggtgaaaagaaaatgatcaatcacaacctacgaagtcatacaaaggaagactagac

SEQ ID NO: 5473 - DNA, 363 bp, Homo sapiens
aaatttaaaaagccaacctttattccactttgaacaagtttgtgaatgtccaaataaggctccttgaaaatttctccttcaggggtaagtatcttcacataaccttctttttccagaatgaagagacgttgcgagccatccccactatgcagggcaccaacgggctgccgcagcccacatcacaacctcctgaatacagaagcagttgtgtttgtgctttctgctgatctcttccactttgtcatattcttccatctggtccaagtagttagatgctggtcctctgacttgttttcttggaaaatctggaaagcacaacccaccatcttttcttgcatagtaaaagcaaaactcatccgcagt

SEQ ID NO: 5474 - DNA, 428 bp, Homo sapiens
  misc_feature (1)..(428): n=a,t,g or c
taaaattaatcgtgaacacttttcttggtaaaaactcaaatacagaggataggcaggatgtctccctgcccccagttttacttcccgacccaaaggaaacctggtaactggctgtcatcctcccagaagtttttctatgcctttatttattaatgtacacttgtaaaacagcatttgggtttgctgttatactaatggcgttataacatacatacattgcagctcttttttcatttaactgagcctcagaaatcctttccatatatacatgtagatctaggccattctttttaaagctgagtaatgtttcatagtgtgggcataatacctacacttgtgtatttccagtaagcctttacagatactactaccntttttcctttaaaaattaaaaggtataatattaataaaaattccccgggaatttg

SEQ ID NO: 5475 - DNA, 466 bp, Homo sapiens
attttttataacagctttattgaggtattattcacataccatgctttaaaaatatacaattcagtggttcttagtacattcacagagttgtgcaaacatcacatctaattccagaacattttgatcactcctcccaaactccataggcattgactttaatgtaatggcatatacatatatagaaatacatatagaaaccaattattctagcaccatttccattctttccccagggactgcaacatcatctgtcataaatcaacttttcatgtctgtgtgaatttggttttgatctccctattgagagactggtgtacagtatttgtctatccctgcacaaattattaaagcaagttttgccattctgttatccttcctcatgaatatcttgattacttttggccctaactcatcaagttccacagaaatcccaattggaatcctaggttaaaattggtggtggtca

SEQ ID NO: 5476 - DNA, 406 bp, Homo sapiens
gtagcttgcgtattattttgagcatctttgtttattaccgctagaaggcaataactagtacaatgctttatatgtataatatatacttatatatgtgtgtgtattcctttaaatcagattctgattatctgaacatacttatttttaaaagacatccatagcacactctattctttatgtgtaaggataaacaatccaagcatactgtgaagatcctgtaacatatagctttatgactttggtttaattttctattccccagtccacattgcttgccggcgttctcctaccctgcatattctgataacaggagcaaagtgactggcattttcctccttctatggaaccaggggattcactagtgttttttctatataattcactggcagagctataataaaacaag

SEQ ID NO: 5477 - DNA, 272 bp, Homo sapiens
tttttttttttaattagctgttcttgtcatatagttttattcctttatctttttttgaacattttatacacccttatttcaatgttccttttagatcactctattctctttactctctgggctttgaatctccttgtttcttgtatctgctgcctctctttgggatacctgggagtttttcctctgacctcgtcttcagtaggaaatgattttccatgagaatcctggttcccctggatgaggacggtgtctcctggggagaatgtcctgtt

SEQ ID NO: 5478 - DNA, 196 bp, Homo sapiens
  misc_feature (1)..(196): n=a,t,g or c
caatagcagacttttaatcaatgccagagacaaagtgaggccgagctaagaacacgctcagctncgttacaatgaagaaatggtttcctttcgatgcaaagtataattgtaaaccacagtgctcgcacagttcacgnctgnttaaagngaaatcttagccatacatcacctaaaagtaattaaaaagtcaacacag

SEQ ID NO: 5479 - DNA, 417 bp, Homo sapiens
ttttttttggcatggcttttttattctctttgcagccaagacctgtttttacaattaaaaccaaaattttgaatcacaaggttcctatgtctatgcatacttgggaacttagtgtgaggaaataatagttaattgaaatactagtggaactgttaaaccacaaatttagactaccaggagaaactgaattatttgatatattacatgtaatgatgcacgttatatattttacatatattacatatatatcttgttaggtgaaatgggcccacttgactcactgaactttattttttagacagagtctcgctctgtcgcccagattggagtgtggtggtgtgatcatagctcgctataacctcaaactcctgggctcaagcattcctcccaccaaagtcctgggattagaggcatgag

SEQ ID NO: 5480 - DNA, 413 bp, Homo sapiens
ttcctatgctttttttctattttaggcacaatgctttaataaattacacaaagactacaaacctttattacatcaattgttacaaaaggctaagtggagaaagattacttatctgaagctgcacaaaatcagtgggcaatatggatttcatttaagcttgtcaattctcctggattaaattcttggcgctgtctcacatattcccaagtcctacatgtagaatgctaaaagttgcagttactaggttgggaaagccatgcccagacgcccctgtgaaaaacatatcaatatattaagttccttagcaaatcacatctagattaagttcataatgctttttttttttttaactttgcaaatctccaaacttttgctactttcttaataaaatacaacaaaatttttggcattcc

SEQ ID NO: 5481 - DNA, 233 bp, Homo sapiens
aagcttgacctaagcatacacagaaaaaattaatatttttgttgttgttctagattctattattcaggcaggctttctatattttccccttaggtatctatactttagtatagatgctgtcactgtgagagactacagaaagcagggaaaatagaagttctatagcttcatctaccaaggaagatctagtttaaaacctagtaggggacatgtcccaacaacttgaaaattag

SEQ ID NO: 5482 - DNA, 314 bp, Homo sapiens
tatatacgaattaaaatttatttcaaactgttttgtacatctttttaaaaaatgaaaattcaaaagtcttagaattaagaatgagtctttgatatcataaagctgtgtataacaataattaaagtagtggtaacattttacccttgtaaaaatgtcacagaattaaaatctcaacttggatcctcaatgattcaactggtttatcttacacaataagcgtttggtcagtttcaagataaaatttccccagacatgctgtccttaagtccttcctcctcaccatccatcagctcacacattggggtagctggctg

SEQ ID NO: 5483 - DNA, 319 bp, Homo sapiens
tttttttttcactgtcaccatgaatttaaatttattgagtgccccacaaatgctagtctattctcagtacatttgatgaacaccatttctttatctctaaaggatgagagaatatttgctactatatattttttttgctcatcacccagccagaatacaaatggaactcctatgaatattctaaagcataatgaggaaggggctccaggctaaatgcaagtatccttgattaatgttttccccaccactgggaatcaccctcccccgctcccctgaagcttccccacaaggtgcggggggaagcaggagaaaaaaaagg

SEQ ID NO: 5484 - DNA, 194 bp, Homo sapiens
tttttttttacaatgtgtttattggacacacaaaaaaactttgcaaccatcataatacatcaatatttaacctagataattctgaaataatttggattctttcatttttcaggatttgagctcatcaattatgttaaatttcctatattctgttacaaatataatacagatttcataagtctgccttgattcac

SEQ ID NO: 5485 - DNA, 247 bp, Homo sapiens
ctagttttgtctttttggcaaataggagtccctcagaatctacacttgctctgaaatgtagaaaaattgattcaataaaggacggtggtgaaaccgtcctttgagatattttacttttcttcttaaagagcatacactttttaatgatcgtgtgtgtgtgtgtgtgtgtgtctgtgtgtgtgtgtgtgtaaaccctttaaaaagagattttggaaactgaattctgggaacgtttttttttttttcc

SEQ ID NO: 5486 - DNA, 289 bp, Homo sapiens
  misc_feature (1)..(289): n=a,t,g or c
agaggttgataaatgcttttaatccccacattccacacacgggggacgctgtcattcacattttcatatttctgttctggtcgcagtctgtgtcctcaccaccctcatgaatgagggactttgatagatgcctgggtttgtgggctctgcggtactgggaaggagatacacaaagggtcctcggaggagggtgtggganagctttgaaggggacaaccactgcngacacctggaggggagctaaggggaanatcctgagactttaangagacattggaatggcttgggc

SEQ ID NO: 5487 - DNA, 567 bp, Homo sapiens
  misc_feature (1)..(567): n=a,t,g or c
attaggagataagtttactgttcattctacaaagacacttaactcatggaacactgagtcactctaacccttgacttcattacacaaaatgaaacacttctgaagaaatacagaatttcttaactcacggcaggatcaaagaacaaaggctcctgctttggcatttcaaagttgaacagagttctcaataagaaggccacagtcaaatactaatggaatctcaactctaaattaaaatgactaatcattaaactgttcaacttagagtaataaaagatttctagatacagaccccgctggcctatagtcagtctgggaagggctagaaagaaccaacccatttgtgtggcttccgtatcttccttgcacaagcaatggaaacccagcagggaaagcagtggagctggcagagggcagggtgagaagacacccagtgaggactgacgggagaggagaggccagggcagcctcaggtacagctcatacctgnacttccttggcctcagaaagggttgctgtgattgnccatgggtccctaaaggccgccagaggcctttggtctggaaa

SEQ ID NO: 5488 - DNA, 423 bp, Homo sapiens
  misc_feature (1)..(423): n=a,t,g or c
gtggacactgaagtctctgcttggttagtagtcatctaatagttgtacacggatttcctcaaacacttggaatcaataattcaaccagtctctgccaaggagctctgtgtgaatgctgaggcacactcaacactccgccatgcaattgacaactctgcattccctttacttatggcttgtgcaganctcaagatcagcttgaagtgagagcttaaggctttcttgggtttttcctgagcatctgcacagtcctgggcatggatggagtcctatttatgcatttggcagtctagattgccaataacactttggaagcttttcaaagtccctatgaaaatctctttttccagcttctccttttaggctttttatttagccaattgctttcccccaactgttatacattaaccccaggcagccaca

SEQ ID NO: 5489 - DNA, 219 bp, Homo sapiens
  misc_feature (1)..(219): n=a,t,g or c
aattgataaactgagtttatattcacctattggaaacagtacaacatattttacatcaggttatgaaatatggatgttttactaaaagacaggaagagctttttccagtctttaaagtaaatacatattcaaagaatcttaaggcataccatttattcatattcatatctattgaaatactgtacatccacatacttcaataaatagttaaaaaccnga

SEQ ID NO: 5490 - DNA, 477 bp, Homo sapiens; identical to SEQ ID NO: 2633
  misc_feature (1)..(477): n=a,t,g or c

SEQ ID NO: 5491 - DNA, 501 bp, Homo sapiens
  misc_feature (1)..(501): n=a,t,g or c
ngaacggtctataagatccagatgtttatttcaaaacccaaacccttgttaccttgaagaatctttacatatttacgtaatacactgtacattatatgcatggcctgtttatactattttcaaaaagagaatattgttttaaactattaataaaccaaaattaattgatagggcagcatcaatctgtattccatccttggtccatggatttccttaaatgatggcatcatgttcatctatggttcgataccgaatgcctcttcttgagtaatacattttgcatccaatgtaaagaatagataaaactcccagcgttaatacaataccaccaacaaagctcccagtatcaaattttgatcctttctttgcttcagaatgcatagttgttgtgattgttactgatgaagcagcagatgtcactgaactattgtggggttacggtcattggtggatgttgatatctgagatgtgtnctgtgaaacacttggttggttttggggt

SEQ ID NO: 5492 - DNA, 310 bp, Homo sapiens; identical to SEQ ID NO: 4791

SEQ ID NO: 5493 - DNA, 447 bp, Homo sapiens; identical to SEQ ID NO: 4792
  misc_feature (1)..(447): n=a,t,g or c

SEQ ID NO: 5494 - DNA, 441 bp, Homo sapiens
cattattataagctgaatttttattttactaaattatctatgtcaaaaaaattctgtgcctggcgtggaatttcactccatcaagtgttacaatgattttttcattttcattacaagcaggagaatgaatgtaggacaagtgttaggaaacatggcaataaattagaatataatttacaaaagcaaaaaaattaacagtgtaccacattattactgagtataaaataataagcaacaactaatcacaataatacaaaggtaatttcgttctgtgttactgaggatacctatgtgacattcattcaaacaaaaaagttcctaatgaaatggactatttgggaaatcatatgtatctcacggggtttaatcattagggtacatttaccgttccctttttagtaggactttatcccagtggcagatactgctcccaggtgtaag

SEQ ID NO: 5495 - DNA, 343 bp, Homo sapiens
  misc_feature (1)..(343): n=a,t,g or c
gcatttatnantantttttatttttgcacaggaaaaactagtgagacaagattcaaacagtctctctctgtgaatcatctgtcagtggtgatgatcacgttaagtttcagaagtgtagtacatgatactcttaacaatttgtctaaagcaatgtttctcaaccaggggcaattttgctcctaaggggacatttaacaatggagacattcttgggttatcataactgggtgaagaaggcaagggtatgtcattgggcatctaggtgaggttgagggctaggggtactgcctaaagntccctaccaatggcacagggntaccccccnttctggtncccancacat

SEQ ID NO: 5496 - DNA, 409 bp, Homo sapiens
  misc_feature (1)..(409): n=a,t,g or c
cctggcattatctttttttcctcctacagtttcttttacagagtcttccgtggctataggtcggaacagttttcctgttgctatgagaacggcataaataagtcaagtttaaaattcactttgggggtatggagccgccacagttccggctacctaagccctcctgggtgtgtgttgcgtactcttccctataggcagtggatcacagccatttaacatggccttcctccaccatggcccatcttctggncagaaaaatnccacaagcctngcagagngccctctaactgcttgggcttctacacacagacctagtaatggtcttctgtgctgcaaggagagnaatatnaagctcaacatttaacatttctccaagtncagaaattcatgggcctcccaaactccacca

SEQ ID NO: 5497 - DNA, 395 bp, Homo sapiens
  misc_feature (1)..(395): n=a,t,g or c
gtgttccaataaaactttatttacacacattgaaacctgaatttcatacaattttcacgttaccaaattttaattttttttcaactatttaaaaatgttaaaaccattcttagctcacaggctatgcgaaanagancaaccagccagattcggcccacggtttaaggccagtttaagcctcaccaccttcctagccccactcacctattttgtcctctcatcttcctgtccttcagcacccccatgaccttcctgtgaccttcaatggcccctccagctgccgtccagccctgtctgtctgcccttnggggaccctctcctcctgggctgcaggactgttttttcctggagcaggtctctaaatagctccattcgccttggcagggggaatccag

SEQ ID NO: 5498 - DNA, 482 bp, Homo sapiens
  misc_feature (1)..(482): n=a,t,g or c
tttttttttttttgagttttgagggcttttaaataatgtgtgtgtgtgcctctgtgtgtgtgtgtgtgtatttttttctagatactagtcctttgttggatgtgtgatttgcaaatatttcctcccagtcagtagcatgtcttttcatttctcttttctgggcctttcacagagcagaagtgtttaattttgatgaagtccactctatccatttttctttttatggatcatgcttctggtatcaagaactttgcctctctccttagatcccccaaattttctcttttatgttgttttctaaaagtattatagtttacgttttacttttaagtctatattccattttcagttaattttgtataaaatgtgagacttaggtctgggttcatttttnttgttgttgcccatggatattcaattactcccaacatgatatttggtcgaaaaggcncttttttggccaatgaattggtttttngcac

SEQ ID NO: 5499 - DNA, 397 bp, Homo sapiens
  misc_feature (1)..(397): n=a,t,g or c
tctggcgggctaacgctttatttnccagccaaggccccgggccgcctgngtttctgctcagaagatcctcacggagtccagctgcacgtccccgcccacctccaccaggcgcacgcngcatgcggcatggcggtggcggaagtggtggtactgggcgtccccaaccacggccttgaagccgtcgtctgacgcgatgatgagcacctcgaagggctgcccgcgctggaaaggaacgcccggcccgcgctcctcgcggccccaaggaagccttgctcctttgctgttgaagaccacctccgacgtgtccagccgggggttgaaatgcagcgcggcatcggagccctgctccttccccgcacagcaggttttacaatggaaccttgcttnggcatttggg

SEQ ID NO: 5500 - DNA, 513 bp, Homo sapiens; identical to SEQ ID NO: 2336
  misc_feature (1)..(513): n=a,t,g or c

SEQ ID NO: 5501 - DNA, 224 bp, Homo sapiens
gctattaatttcatgtttatttcatacagggtttttgtcaagtttatcagttttaaaatgattaagtcataatcaccattcaaagacaaattttcctctcaaaataataatttccattctgctacctacagtttggcttatcctttggtctgatagccatacttcatctcacgaggactatacaagtatgtactatgtacaaaacattttcaagtttgctttca

SEQ ID NO: 5502 - DNA, 448 bp, Homo sapiens
ttttttttttttattgtgaacacaattttctttatttcatttttggagttttctgaacagaaaaatacaattgattttctgtatattgatctagcctgtgaccttgctgaacttgattaattctattacactatgattttttgttgtggttagacccttacacaatcaaatgaggttaaaaaaaaattgtcagagtggccccagaccaacaacaggatgacagtagcctttgcccatacagagataaaatttagtttttgcagtcctttcccatagagattgtatggcagtagcaattctatggcctactgccatacaacctgaactgaagtccagaaagtttaggtgactgggccacagagctaattactggtggagccaagaagagaaattatatccctacctccttgcccactaagctccccattccagtgggctgctttctggt

SEQ ID NO: 5503 - DNA, 378 bp, Homo sapiens
gtccaaaaaatatgtagtgtcaagttcaccactcaaattctaaagatgtcagttgtctaagggacaaaaaagttgccccaaaaagtcctagggaagcttatgggtacacttaccttgctggagaatggtgccatctgcattaactggttgatagacgatggtctgcccttcagcagtctgtgcacttgctgtccctggacagaattcgtgctgcatgtgtctggtctggccagcagtgacagccgtctggggctgctggatgatgatctgctgggtctggcctgctggcctgcacctgcacagcctgtccaccctggatctggatctgtccaggtgggaccaactggtatttgctgcaaaccctgtgttccagaaaca

SEQ ID NO: 5504 - DNA, 403 bp, Homo sapiens
caagtgaaaataaaaatttattccaagttcaaagtcatagagaggaactgaagtcatcaggtgcaggactggggtcaggaaagggcaaggactttgtgtggctttatatgaaggaacgagtttaacatgaggaaggaaccatgaaccagagataaagaaagcctgtgcagaaagttaaaggatccttttcctgtttcttagctgacaaagactttcttcagctagccataaggcaactgtcaaatatcatcacatttatcttgaaggataaaatttgtgcaagctcaattgaacagcaagaactagatgcaaggaagaagtcagccaggatgactgtggggctgggtcatttctcagcttgttagagactgagcccagagatagtctttagtccagactgtta

SEQ ID NO: 5505 - DNA, 393 bp, Homo sapiens
ttttagaagtgacatattgttatattttcaccataggtttgctttaagaaatagtgctcccttcagaatggaagaatttatctgcctcttatttgatgtggatcagagctaagatggctgactaaataaacatgggggactggaatctccttggagatactctggaggaagttcacatccactccaccatgattggaaagatctggctcaccatcctgttcatatttcgaatgcttgttctgggtgtagcagctgaagatgtctggaatgatgagcagtctggcttcatctcctgcaaagaaacctaattgctacgggggccggaagaggaataggtgcggctccgacagccagaggggcgggcatacgcagcctccctcggctcagcctgct

SEQ ID NO: 5506 - DNA, 395 bp, Homo sapiens
taaaaactggctttaatggacattaacaaataatatacactgatttatcacctttaagcaacaaaaacatgacttgtaattattcaaataaggtaggatttttctcttaagtacacttcttaaaagtcattcacaagacaactgggcatccactaagaccaaggcactgtgggggaggcaaacagcacaacatcctcacctcaaggagctcagcctgggatgaagacagacacacacaactccagcatgaggccaaggggtagcctgttatgggatcaagtggtggcagaatcaagaagtggttctgaaagtgttctttagtcacagagaccagtaggtttgaaacccagtgatgttactttttaactttgtgccttacctactataagcctcag

SEQ ID NO: 5507 - DNA, 115 bp, Homo sapiens
tttaattgagacaaggtctcagtatattactaaggttggtctcgaactcttgcgctcaaggatactcctgtctccacctcccaaagtgctgggactacatcacagctcacttgaa

SEQ ID NO: 5508 - DNA, 411 bp, Homo sapiens
ttttgaatttacaaatgtatctttatttattttgtcttgaacttcacgtcaatacagattctgcattgctcaactaatgaatgcaggaaggactgcatgaggccagcacggcacgtcctcacaccagcagttcttcttggtctgagtcctttcctggctgcagcagagagaacagagaaagcgcaacactgtgttcatggtgctattgtaattaatgtattataattattttgtatcttctgttagatcttctgccttgattcccagtgtccaaatacaaaagtattgactactgtccctgatgtgaagagcaggatctattgaagccgaacacatcatctttcagttccaggtaggagtgcagtaagaagagttttcttacaggcatgatcgctgtgatggataagtgtg

SEQ ID NO: 5509 - DNA, 414 bp, Homo sapiens
aaagagcttctaacagcttctgtccatttattggttggatgacaaatgaaaaagtttctttggccttgacaatctccatcaaagaaaccaaataagcatgttaaggaaacatacagtatatgaacagttaattcttgtattgcttggacatcaataaatctaataaaaacgaccaagaatagtcactcagttttacaatatagaaggcagagaaaactctgacactccaagttgtgaagacaatgaaacattccagtactccattagaggactttttgtatctacagctgcctgtgctttgaaggtaaaaacccagaatttaaattcaaacatattcagttaatgcacttatgcattttacaaatttttgttctggtatagcatatgaaagggagctatatctgcccccatttc

SEQ ID NO: 5510 - DNA, 382 bp, Homo sapiens
tttatattttaacacatctttattctcacagtgctagtcaacaacattgttcacaatcacaatcctctgagtggcaccccaaaattgagaaaggcagagaaatgaataattcaataatgctgaaagtcatcaatgtaatcaaaattcccaagaacaggacagtaacagccttacactgactattttggtgagaataaccacaaatgtagttttgatctaggatgaaaccaaatgtgaggagaatgattccagctattgctcccagggcactaagaaaattcattattcggctcaatattatcagagtttctgtggtttttcttttcactgcaattaggagggctccagaattaatgaacaaaacagagccccagaatggata

SEQ ID NO: 5511 - DNA, 252 bp, Homo sapiens
tttacttccatggattttaatgttctaagctaagtaagaatctcttcaataaagtgagaattaaaaggagaatggagctaggagttgagagaggcaacaaataatgagagagcagaaagcaaatccacaaaaaactgtcacatgacagaggccagaatggagctgatgcagctgcgtcatttcctacagacctagttgaccatgtggagaagaggcttgaacaaatggggacgttctccaaccttccaaatc

SEQ ID NO: 5512 - DNA, 429 bp, Homo sapiens
  misc_feature (1)..(429): n=a,t,g or c
ttttttagtgtcagtagaaggtagctgttatttattgttctattctggggtaaaggtatcagattctcaaagggattcttaatctagaaagtttgcgaagagatggcaaaggtgtttgaaagctatcaggaaaccatcctcgcgtaaaacgaagcagcgctacagaagtgggctgccatgggaatcgggaggcccaggttccactgctaacttgctgcagcttactgggtgattgtctctcgcgagaagacgggccgcgccggcgatacggattccgagcgagtggtggtggtagtggtggtggtggcggccgagacgcggcggccatatttggtgaggcctcgggagcggcagacnnggttcagctgggagtagcgtctgccctttttcccacccaccgtccgcatctgtgtgctgcgcgaagaggca

SEQ ID NO: 5513 - DNA, 412 bp, Homo sapiens
tttggtagaaattggcaagctaattctaaaattaaatgaaatgcaaaggaccaggaaaagccaagagactcttggagaagcaacacagtggaagactttcactatcagatagcaagaccttcaagttatgagaatgaagagagtgacttaaagacttacaaagagaccaacaggacaaaaaagaaagtccagaaacatatccacacatgaatctttgacttatgacaaaattggctctgtagagtagctggaaagggaaagtcttttaaataaattgttctggattaatttgatatccatctggggaaaaaaaaaaacaaaaaacaatattgacctctacctcatgtcatacctaaaaatcaattccaggtggactgtagatttaaatgtaaaaggtaaaataataaaactc

SEQ ID NO: 5514 - DNA, 234 bp, Homo sapiens
tttttttttttttttttttttttttatttactcagtgaatttattgtaaaaataaagaaactcaattattccagttaatggatttcacgttaaatagtttaactttcaatgggctttctgaagagctgttcataggatgatatttggaagagtcctttccttaaggaaaaaaagggtgaacaataaataaagagttacttgcgttaacggtcacgttatttcattaaaagagag

SEQ ID NO: 5515 - DNA, 353 bp, Homo sapiens
tttcttcattttcctagcaactaaaacgaacaaaaagaagtactgaaatgcaggactgacaacttaaaataattccatttttgtttctagtttttttcctgaacgttaaagacttaaacgataatcactgcacatagaaactaagtatttttgtcttaattgaaaattagttattaactcataaaaagatataaaatattcttcaaagttaaagccctaaatttaaattggtttatgtaagaaatccgttgacactgatgaattaccctcactaaggctgggaggaggagaataatcttccatgtcagaatctgacggacttcggtttcgataacgaccaccacctgaactcc

SEQ ID NO: 5516 - DNA, 341 bp, Homo sapiens
aggcaatcctccctccttggcctcccaaagtgttgggatttcaggtgtgagccactctacctggctgagacttgctctcatttttaaattcaaaaaatgttttccatagatcggccgcctgtggaaaaaggtgactcaggcctgtaatcccagcactttgggaggcctaggtgggtggatcacctgaggtcaggagttcaagaccagcctggccaacacggtgaaactccgcctctactaaaaatagaacaattatctgggcatggtggcaaatgcctgtgatcccagctattccggagactgaggcaggagaatcactttagcccatgagacaggggatg

SEQ ID NO: 5517 - DNA, 351 bp, Homo sapiens
caggttcaagttgaacagctcctctttaatcaaagggagaacacagatgtatcaaacagagtaggaaagaaatgtatcaaaagacagtaggaaagaaagcctttccttcttgaaaggctgaggttgagagggaaagctaatttatcactacaactctatggtagctttccatgctaaattttccctgcctcttttgtgattttttgatatggaagagtaggggttatatcttctctgtaacaattaggccatatttccttataccaagtagaggtgctcaaacactgtagtggtattaaagggctgaggagagtaactgaagactggcatacagaactccacctggaggac

SEQ ID NO: 5518 - DNA, 417 bp, Homo sapiens
ttttaatgttgaagactccactcagtcatttgagctccaggaagccttccctggccacccataagttaagagaaaagcccctcttctgagctcccagagcacccacttcatacctatgctatagaacacaccgccaaggacggaaattatccaaaggtttgtgtccattgattgccatgccaggcatccagctctgctgaagcacgcaggggccctgacttcctcattaggtattctcaacacctccaccagcagctggtaggcagcagagctattgttactgagctgcccacggaccaatggatctatgaatgaacctgaacgtcttccctggagaaaagcacttgcttgtcaagggaggaacaggggtctgaaatgctaacccctgccctatagtatgggtgtgcatacggtgca

SEQ ID NO: 5519 - DNA, 454 bp, Homo sapiens
tttatttttatttttgaacaatgagaacacatggacacaggaaggggaacatcacactctggggactgttgtggggtctttagaggggggagggatagcattaggagatatacctaatgttaaatgacgagttaatgggtgcagcacaccaacatggcacacgtatacatatgtaacacacctgcacgttgtcgacatgtaccctaaaacttaaagtataaaaaaaaaaagtcaggaaacaacaggtgctggagaggatgtggaaaaataggaacacttttacactgttggtgggactgtaaattagtttaagtattgtggaagtcagtgtggcgattcctcagggatctggaactagaaataccatttgacctagccatcctattactgggtatatacccaaaggattataaatcatgctgctataaagacatgcacacgtatgtttattgtg

SEQ ID NO: 5520 - DNA, 387 bp, Homo sapiens
  misc_feature (1)..(387): n=a,t,g or c
gatccagcttattcttttattttcaagtccattcttggggctggtggggaggcaggagaatacccctccctaagcccttagtgtgtgccgagcttgctttntgatgttggcaggggaggggagacctgggtggtgnctgagttccctttatcaaacccttcaatgggcacaaaattgagtgcttnnttnntaggttttatttnnnnatgaatgtccaaatctgtgtttccccctgccanaacagactgtgtggccagttgaaagtgtcttggtttgtggttcatctctccctcattttcttggaggcagggcctgaganccctgncanaatctcctatggttntgaatccacggcttctttttggacattaaaggttgatttgatgc

SEQ ID NO: 5521 - DNA, 481 bp, Homo sapiens
  misc_feature (1)..(481): n=a,t,g or c
ctcgagactgaatcttgctctgtcgcctaggctagagggcagtggcgcaatctcagctcactgcaacctctgcctcctgggttcaagcgattctcgtgcttcanccacctgagtacctggtattacaggtggctgccaccatgcctggctaattctgtattttttatagagacaggtatctcattatgctgcccaggctggtcctgaacttctgagctcaagcaattcactcaccttggcctccccaaagtgctgggattacaggtgtgagccactgcacctggttgagacactactttcacacacttttacatttcacacttctatgaagacagggtctgcaatctggcaatgtctatgatttagtgggaggtagaaggaggcccagggacagaaacataaactttccatgtcaggatgttggctgtgacaagcatgcccaagactttggacatgatttttctgttctagatctgtttcc

SEQ ID NO: 5522 - DNA, 478 bp, Homo sapiens
catggattcactctattgcccaggctggagggcagtggtgtggtcttggttcactgcaacctccatttcccaggctcaagcaattctcgtgcctcagcctcccaggtagttgggattacagtcatgtactaccatgcccggctaattttttaatttcctgtagaggtgggtgtttgtcatgttggctaggctggtcttgaactcctggcctcaagtaatctgcccatcttgacctcccagagtgctaggattacaggtgtaagccattgtgcccggcctccatgattttagaaacaccgtttttctttacttaattttttcttaattagaaatgggcccagacatccaacaagcaattattacttaatttaaaaatttcaggattttaaaatatatgaaaactctatttacaagcatttatttttaatttattggagatggagtctactctgtcacccaggctggagtgcagtggagt

SEQ ID NO: 5523 - DNA, 623 bp, Homo sapiens
  misc_feature (1)..(623): n=a,t,g or c
ccattgtcaagaaatttaatatggcaccaggagatttgcataattgacctatttggctttctgcatcaagtttggtgtcctgttgcagaagctgagcattgacgggacagaggcataaactgcagcgcttgataaaatagagcccagtattctgaggttagtgaagaaaacacaaagacttgacagatgcactcccagatcgcatctcacagtcattcaaggtttagggcaaagcatttncatgtggagnngnaccttnaccttntcccgnccagtcatgcatcttggaagttccttggctaagtctgcagggaaggagaagcagcaggcttgatttgcatcaataaaagcagcgatctgtgctggccatgctaaccctgttggctattagggggtgggggcactctgtcaaggggagtcactgggacggtgtaggattcagccttcagagcctgctggcctgaccgtagaaggaggaacctgcacacaccctgctggttttagttcacgagcagctatcaaagcctgttagccatcctggttacctgcttgtgccaganagaacttactgtcccaggtaagcncctaattttttaagtcttagttcctgtcaaaggccactt

SEQ ID NO: 5524 - DNA, 457 bp, Homo sapiens; identical to SEQ ID NO: 3268
  misc_feature (1)..(457): n=a,t,g or c

SEQ ID NO: 5525 - DNA, 325 bp, Homo sapiens
  misc_feature (1)..(325): n=a,t,g or c
ttttttttttttttttttttttttaatgttaaaaatatttattttttttccnaaaagatcacacaaaagttgggaagagaaggatgtcaattagactacatcaaaatctgggcagagggaggacaaagagctgcctaaagaaactggtagctggagcaaactgcagagntcaagatgaccctagtccacggaaccagcagcccaggncagccacnttcaggngcaccacccgnggcacggcagggagagcaaagttgctggccccantcattcctccttttcagggcaggagaggcagaagctcactntttagacatgttcttga

SEQ ID NO: 5526 - DNA, 355 bp, Homo sapiens
  misc_feature (1)..(355): n=a,t,g or c
acagtaatgganttnaaaccaaagtgatagttctttattatagcaaagtgatagtttttttatttaaaataagttattttttacaacctccttatataaaagatgtttatgaaagaaaaaattgagtgtgtctcggtgccatttttttaatgcaatgaatgatatccatgaaaaaggaacatctgaatcttttgttttaaaagacagtgcagggtataggtggaatttatgggnggatacatcccggataaatttgccataatggaaatgagggagaggtggtataataatttttttctactgttatcccntctagggccctgacttgctcngcatgggggcccaagggggnggt

SEQ ID NO: 5527 - DNA, 433 bp, Homo sapiens; identical to SEQ ID NO: 3000
  misc_feature (1)..(433): n=a,t,g or c

SEQ ID NO: 5528 - DNA, 189 bp, Homo sapiens
gacgcttgtcaacattttttaatcacagcagcaaagacaaaggagcgatggcacagcaggttctctgaccaaccctggaaatacttcatgtttctaaatgtgcttcctgatttttccagagtcataaagctgatgtgtgtgtggtgttggctgttttcttcacagtctcatgccagacacacaacataa

SEQ ID NO: 5529 - DNA, 222 bp, Homo sapiens
  misc_feature (1)..(222): n=a,t,g or c
gacacttaacacagggctttaatgnaacaccatttagnaacaggacaaattgaaaagtgaggggtactttgtggttaagaaaatgggggaccacatctgttggagagtgggcatttgacaacaatgggccaggtaccccgcatgtaaaatcaaaatntaagggtctttttaagggctggaaaagttgctgctggggcattgcagttaatgggtcagacattt

SEQ ID NO: 5530 - DNA, 570 bp, Homo sapiens
  misc_feature (1)..(570): n=a,t,g or c
tcttttttcagatgtgcaggtntttatttcctctccctcactctgctcnaacacccagcataaggcactacccccagatgggagggaagggagggcnactgtgaactcaagtntgagggggtcatctgcannaagaccggagttgcttccatgtcactctcctctcaagagaagctgctatttcagggtaaatggagtctgctctcatccatggttaaaagtggattgagacgntctacagaganttccatcttctttttaaggaacacatccgaacganttcagaagggaaattttgatatttaaaantcagtgtctctcacttcccactccatccnccacctccctttntaagctcagagcacagcgttcctacggtccagccagggaatctttccagaaaggggnttgagagtttcgggcccctgatgggagcggctcatttgctggccgtgaacgctgggtttcccgtgatagctctcccaaggttcagggcgtgattgtcatgtgtaccttcgaggnttttnacggnctcagggtcatggcgtncggttcacgtgatattcgtag

SEQ ID NO: 5531 - DNA, 179 bp, Homo sapiens
  misc_feature (1)..(179): n=a,t,g or c
ataagcctaaagaacacaagtagctaaagtatgggtatatatgctaatcatagagagaaaagcaataacaataggaaatgtggtcctgaaaataggcttgtgaagataaatctacttcattctacccaaaccctttaagatacacattcattngtaagaatttaccaagcatctgccat

SEQ ID NO: 5532 - DNA, 388 bp, Homo sapiens
accaccaaaatgccagaatttattcaccaagtgagcatcgggtaacatccatggatgagagtttaaacatctcttggttgctatggagggtccaagaagaaaacaaaatccattagtataaaggtttgtatttgctgtgacctctattgtcttgagagacagagtagacagaagaaataacaaatgtgaagtcctggaatatagatgagcttgtgatgaaagacggaacagagtgaacggtcagagctgttggaggaagaaagcaggaagggcaataaaggtccaagtggtagccagagcctcggtttattctagatgagaagggagatggtggagtcttttaagcaggagagaaacatgttctgagttacattttttaaaaatgtaa

SEQ ID NO: 5533 - DNA, 250 bp, Homo sapiens
  misc_feature (1)..(250): n=a,t,g or c
gtgatcagtctcaagaatattccattatattccattgcctgcctcccccaacttgtgctgatattttaaggatgtgctcaagagtatgaagcagggtgcttttgtccctttctctcctccctagtaattccctcctccctatcccatagccaagtagccacccctcaaatnagccattcctttttgctttcatcaatggtctctgtgaagttggggtcgttgttcatgatggcggcgtccgcgctctctg

SEQ ID NO: 5534 - DNA, 3041 bp, Homo sapiens
gaaaaagagaggaagagaaaccatttagagactgtgcagatgtatatcaagctggttttaataaaagtggaatctacactatttatattaataatatgccagaacccaaaaaggtgttttgcaatatggatgtcaatgggggaggttggactgtaatacaacatcgtgaagatggaagtctagatttccaaagaggctggaaggaatataaaatgggttttggaaatccctccggtgaatattggctggggaatgagtttatttttgccattaccagtcagaggcagtacatgctaagaattgagttaatggactgggaagggaaccgagcctattcacagtatgacagattccacataggaaatgaaaagcaaaactataggttgtatttaaaaggtcacactgggacagcaggaaaacagagcagcctgatcttacacggtgctgatttcagcactaaagatgctgataatgacaactgtatgtgcaaatgtgccctcatgttaacaggaggatggtggtttgatgcttgtggcccctccaatctaaatggaatgttctatactgcgggacaaaaccatggaaaactgaatgggataaagtggcactacttcaaagggcccagttactccttacgttccacaactatgatgattcgacctttagatttttgaaagcgcaatgtcagaagcgattatgaaagcaacaaagaaatccggagaagctgccaggtgagaaactgtttgaaaacttcagaagcaaacaatattgtctcccttccagcaataagtggtagttatgtgaagtcaccaaggttcttgaccgtgaatctggagccgtttgagttcacaagagtctctacttggggtgacagtgctcacgtggctcgactatagaaaactccactgactgtcgggctttaaaaagggaagaaactgctgagcttgctgtgcttcaaactactactggaccttattttggaactatggtagccagatgataaatatggttaatttcatgtaaaacagaaaaaaagagtgaaaaagagaatatacatgaagaatagaaacaagcctgccataatcctttggaaaagatgtattataccagtgaaaaggcgttatatctatgcaaacctactaacaaattatactgttgcacaattttgataaaaatttagaacagcattgtcctctgagttggttaaatgttaatggatttcagaagcctaattccagtatcatacttactagttgatttctgcttacccatcttcaaatgaaaattccatttttgtaagccataatgaactgtagtacatggacaataagtgtgtggtagaaacaaactccattactctgatttttgatacagttttcagaaaaagaaatgaacataatcaagtaaggatgtatgtggtgaaaacttaccacccccatactatggttttcatttactctaaaaactgattgaatgatatataaatatatttatagcctgagtaaagttaaaagaatgtaaaatatatcatcaagttcttaaaataatatacatgcatttaatatttcctttgatattatacaggaaagcaatattttggagtatgttaagttgaagtaaaaccaagtactctggagcagttcattttacagtatctacttgcatgtgtatacatacatgtaacttcattattttaaaaatatttttagaactccaatactcaccctgttatgtcttgctaatttaaattttgctaattaactgaaacatgcttaccagattcacactgttccagtgtctataaaagaaacactttgaagtctataaaaaataaaataattataaatatcattgtacatagcatgtttatatctgcaaaaaacctaatagctaattaatctggaatatgcaacattgtccttaattgatgcaaataacacaaatgctcaaagaaatctactatatcccttaatgaaatacatcattcttcatatatttctccttcagtccattcccttaggcaatttttaatttttaaaaattattatcaggggagaaaaattggcaaaactattatatgtaagggatatatatatacaaaaagaaaattaatcatagtcacctgactaagaaattctgactgctagttgccataaataactcaatggaaatattcctatgggataatgtattttaagtgaatttttggggtgcttgaagttactgcattattttatcaagaagtcttctctgcctgtaagtgtccaaggttatgacagtaaacagtttttattaaaacatgagtcactatgggatgagaaaattgaaataaagctactgggcctcctctcataaaagagacagttgttggcaaggtagcaataccagtttcaaacttggtgacttgatccactatgccttaatggtttcctccatttgagaaaataaagctattcacattgttaagaaaaatactttttaaagtttaccatcaagtcttttttatatttatgtgtctgtattctacccctttttgccttacaagtgatatttgcaggtattataccatttttctattcttggtggcttcttcatagcaggtaagcctctccttctaaaaacttctcaactgttttcatttaagggaaagaaaatgagtattttgtccttttgtgttcctacagacactttcttaaaccagtttttggataaagaatactatttccaaactcatattacaaaaacaaaataaaataataaaaaaagaaagcatgatatttactgttttgttgtctgggtttgagaaatgaaatattgtttccaattatttataataaatcagtataaaatgttttatgattgttatgtgtattatgtaatacgtacatgtttatggcaatttaacatgtgtattcttttcatttaattgtttcagaataggataattaggtattcgaattttgtctttaaaattcatgtggtttctatgcaaagttcttcatatcatcacaacattatttgatttaaataaaattgaaagt

SEQ ID NO: 5535 - DNA, 1311 bp, Homo sapiens
acctcctgtggccagggcttctatgggctgtggcttatgtctcatgtgtcattctccagggaagcgccgccgagctgctatggacttccctggagccaaggtcattgttccccagctgaagggcagggtgcagcggaggcgtgtggggttgatgtgtgagggggcccccatgcgggcacacagtcccatcctgaacatggagggtaccaagattggtaggtggaccagggaagctgggaaacccttgtctcttcccaggagggtgggggcactggcagggtggtgctgatgcgtggcttatgcttgcttgacaggtactgtgactagtggctgcccctccccctctctgaagaagaatgtggcgatgggttatgtgccctgcgagtacagtcgtccagggacaatgctgctggtagaggtgcggcggaagcagcagatggctgtagtcagcaagatgccctttgtgcccacaaactactataccctcaagtgaagctggctcagggtggggctgtcccttccaggagttttgcccctacaaggggttagtcaagaagctgaggcagaactcactgggggtgggcagttaaggtggaggctgattctaattgtctggttgaggggccacaccacctattccccccacctaactcatgccattccagcttccttcaggaccctgcttctgagtgacggaccagctcacacaatgtcttgtttcagtccatgatcccactgacctactcttgcctgctggagggtaatgagaagctttggttctgccatctctcccactctgccaggtgctggctgtggagcaaaggctcacctttgtggagaggataaaacctkcccaacctacctcaccatggtttttcacattgcaaagggtaataacatgggcagtgcggacttaggctaccccctccagtttgctttccgtaaatgcaaattgtccttactgcaagtcaggaatgattgctgactcacagtagggctgctatgcctgtgtgtaaacttggggatggctgagggaacatagactcactcttccacattcccaagttggtctagtgtgctgcccagtagcaaaccatggcagactcaccacctattctgagttccagggctgctgtagggcagggtgggcttcctcccagacttgccttaccctgggctgatctttgcccctggtatgcattaatggactccactgaatcctgaaaaaaaaattaaacttccttcttacttgccagtctctagcttcattgttctctgttcacagggttcctgaaatgccaacccaatgcc

SEQ ID NO: 5536 - DNA, 1206 bp, Homo sapiens
gttgctgtcggggagttgaaacctaattttgtggcgtagagctatgcagcttgaaatccaagtagcactaaattttattatttcgtatttgtacaataagcttcccaggagacgtgtcaacatttttggtgaagaacttgaaagacttcttaagaagaaatatgaagggcactggtatcctgaaaagccatacaaaggatcggggtttagatgtatacacataggggagaaagtggacccagtgattgaacaagcatccaaagagagtggtttggacattgatgatgttcgtggcaatctgccacaggatcttagtgtttggatcgacccatttgaggtttcttaccaaattggtgaaaagggaccagtgaaggtgctttacgtggatgataataatgaaaatggatgtgagttggataaggagatcaaaaacagctttaacccagaggcccaggtttttatgcccataagtgacccagcctcatcagtgtccagctctccatcgcctccttttggtcactctgctgctgtaagccctaccttcatgccccggtccactcagcctttaacctttaccactgccacttttgctgccaccaagttcggctctaccaaaatgaagaatagtggccgtagcaacaaggttgcacgtacttctcccatcaacctcggcttgaatgtgaatgacctcttgaagcagaaagccatctcttcctcaatgcactctctgtatgggcttggcttgggtagccagcagcagccacagcaacagcagcagccagcccagccgccaccgccaccaccaccaccacagcagcaacaacagcagaaaacctctgctctttctcctaatgccaaggaatttatttttcctaatatgcagggtcaaggtagtagtaccaatggaatgttcccaggtgacagcccccttaacctcagtcctctccagtacagtaatgcctttgatgtgtttgcagcctatggaggcctcaatgagaagtcttttgtagatggcttgaattttagcttaaataacatgcagtattctaaccagcaattccagcctgttatggctaactaaaaaaaagaaaatgtatcgtacaagttaaaatgcacgggcccaagggggattttttttttcacctccttgagaatttttttttttttaagcttatagtaaggatacattcaagcttgggttaaaaa

SEQ ID NO: 5537 - DNA, 3058 bp, Homo sapiens
gccccacagtgagaggaaggaaggcaacagtcgccagcagccgatgtgaagaccggactccgtgcgcccctcgccgcctctgcctggccacatcgatgttgtgtccgccgcctgctcgcccggatcacgatgaagcccccaaggcctgtccgtacctgcagcaaagttctcgtcctgctttcactgctggccatccaccagactactactgccgaaaagaatggcatcgacatctacagcctcaccgtggactccagggtctcatcccgatttgcccacacggtcgtcaccagccgagtggtcaatagggccaatactgtgcaggaggccaccttccagatggagctgcccaagaaagccttcatcaccaacttctccatgatcatcgatggcatgacctacccagggatcatcaaggagaaggctgaagcccaggcacagtacagcgcagcagtggccaagggaaagagcgctggcctcgtcaaggccaccgggagaaacatggagcagttccaggtgtcggtcagtgtggctcccaatgccaagatcacctttgagctggtctatgaggagctgctcaagcggcgtttgggggtgtacgagctgctgctgaaagtgcggccccagcagctggtcaagcacctgcagatggacattcacatcttcgagccccagggcatcagctttctggagacagagagcaccttcatgaccaaccagctggtagacgccctcaccacctggcagaataagaccaaggctcacatccggttcaagccaacactttcccagcagcaaaagtccccagagcagcaagaaacagtcctggacggcaacctcattatccgctatgatgtggaccgggccatctccgggggctccattcagatcgagaacggctactttgtacactactttgcccccgagggcctaaccacaatgcccaagaatgtggtctttgtcattgacaagagcggctccatgagtggcaggaaaatccagcagacccgggaagccctaatcaagatcctggatgacctcagccccagagaccagttcaacctcatcgtcttcagtacagaagcaactcagtggaggccatcactggtgccagcctcagccgagaacgtgaacaaggccaggagctttgctgcgggcatccaggccctgggagggaccaacatcaatgatgcaatgctgatggctgtgcagttgctggacagcagcaaccaggaggagcggctgcccgaagggagtgtctcactcatcatcctgctcaccgatggcgaccccactgtgggggagactaaccccaggagcatccagaataacgtgcgggaagctgtaagtggccggtacagcctcttctgcctgggcttcggtttcgacgtcagctatgccttcctggagaagctggcactggacaatggcggcctggcccggcgcatccatgaggactcagactctgccctgcagctccaggacttctaccaggaagtggccaacccactgctgacagcagtgaccttcgagtacccaagcaatgccgtggaggaggtcactcagaacaacttccggctcctcttcaagggctcagagatggtggtggctgggaagctccaggaccgggggcctgatgtgctcacagccacagtcagtgggaagctgcctacacagaacatcactttccaaacggagtccagtgtggcagagcaggaggcggagttccagagccccaagtatatcttccacaacttcatggagaggctctgggcatacctgactatccagcagctgctggagcaaactgtctccgcatccgatgctgatcagcaggccctccggaaccaagcgctgaatttatcacttgcctacagctttgtcacgcctctcacatctatggtagtcaccaaacccgatgaccaagagcagtctcaagttgctgagaagcccatggaaggcgaaagtagaaacaggaatgtccactcaggttccactttcttcaaatattatctccagggagcaaaaataccaaaaccagaggcttccttttctccaagaagaggatggaatagacaagctggagctgctggctcccggatgaatttcagacctggggttctcagctccaggcaacttggactcccaggacctcctgatgttcctgaccatgctgcttaccaccccttccgccgtctggccatcttgcctgcttcagcaccaccagccacctcaaatcctgatccagctgtgtctcgtgtcatgaatatgaaaatcgaagaaacaaccatgacaacccaaaccccagcccccatacaggctccctctgccatcctgccactgcctgggcagagtgtggagcggctctgtgtggaccccagacaccgccaggggccagtgaacctgctctcagaccctgagcaaggggttgaggtgactggccagtatgagagggagaaggctgggttctcatggatcgaagtgaccttcaagaaccccctggtatgggttcacgcatcccctgaacacgtggtggtgactcggaaccgaagaagctctgcgtacaagtggaaggagacgctattctcagtgatgcccggcctgaagatgaccatggacaagacgggtctcctgctgctcagtgacccagacaaagtgaccatcggcctgttgttctgggatggccgtggggaggggctccggctccttctgcgtgacactgaccgcttctccagccacgttggagggacccttggccagttttaccaggaggtgctctggggatctccagcagcatcagatgacggcagacgcacgctgagggttcagggcaatgaccactctgccaccagagagcgcaggctggattaccaggaggggcccccgggagtggagatttcctgctggtctgtggagctgtagttctgatggaaggagctgtgcccaccctgtacacttggcttccccctgcaactgcagggccgcttctggggcctggaccaccatggggaggaagagtcccactcattacaaataaagaaaggtggtgtgagcctga

SEQ ID NO: 5538 - DNA, 4517 bp, Homo sapiens
ctgattccataccagaggggctcaggatgctgttgctgggagctgttctactgctattagctctgcccgggcatgaccaggaaaccacgactcaagggcccggagtcctgcttcccctgcccaagggggcctgcacaggttggatggcgggcatcccagggcatccgggccataatggggccccaggccgtgatggcagagatggcacccctggtgagaagggtgagaaaggagatccaggtcttattggtcctaagggagacatcggtgaaaccggagtacccggggctgaaggtccccgaggctttccgggaatccaaggcaggaaaggagaacctggagaaggtgcctatgtataccgctcagcattcagtgtgggattggagacttacgttactatccccaacatgcccattcgctttaccaagatcttctacaatcagcaaaaccactatgatggctccactggtaaattccactgcaacattcctgggctgtactactttgcctaccacatcacagtctatatgaaggatgtgaaggtcagcctcttcaagaaggacaaggctatgctcttcacctatgatcagtaccaggaaaataatgtggaccaggcctccggctctgtgctcctgcatctggaggtgggcgaccaagtctggctccaggtgtatggggaaggagagcgtaatggactctatgctgataatgacaatgactccaccttcacaggctttcttctctaccatgacaccaactgatcaccactaactcagagcctcctccaggccaaacagccccaaagtcaattaaaggctttcagtacggttaggaagttgattattatttagttggaggcctttagatattattcattcatttactcattcatttattcattcattcatcaagtaactttaaaaaaatcatatgctatgttcccagtcctggggagcttcacaaacatgaccagataactgactagaaagaagtagttgacagtgctattttgtgcccactgtctctcctgatgctcatatcaatcctataaggcacagggaacaagcattctcctgtttttacagattgtatcctgaggctgagagagttaagtgaatgtctaaggtcacacagtattaagtgacagtgctagaaatcaaacccagagctgtggactttgttcactagactgtgcccttttatagaggtacatgttctctttggagtgttggtaggtgtctgtttcccacctcacctgagagccattgaatttgccttcctcatgaattaaaacctcccccaagcagagcttcctcagagaaagtggttctatgatgaagtcctgtcttggaaggactactactcaatggcccctgcactactctacttcctcttacctatgtcccttctcatgcctttccctccaacggggaaagccaactccatctctaagtgctgaactcatccctgttcctcaaggccacctggccaggagcttctctgatgtgatatccacttttttttttttttgagatggagtctcactctgtcacccaggctggagtacagtgacacgacctcggctcactgcagcctccttctcctgggtccaagcaattattgtgcctcagcctcccgagtagctgagacttcaggtgcattccaccacacatggctaatttttgtatttttagtagaaatggggtttcgtcatgttggccaggctggtctcgaactcctggcctaggtgatccacccgcctcgacctcccaaagtgctgggattacaggcatgagccaccatgcccagtcgatatctcactttttattttgccatggatgagagtcctgggtgtgaggaacacctcccaccaggctagaggcaactgcccaggaaggactgtgcttccgtcacctctaaatcccttgcagatccttgataaatgcctcatgaagaccaatctcttgaatcccatatctacccagaattaactccattccagtctctgcatgtaatcagttttatccacagaaacattttcattttaggaaatccctggtttaagtatcaatccttgttcagctggacaatatgaatcttttccactgaagttagggatgactgtgattttcagaacacgtccagaatttttcatcaagaaggtagcttgagcctgaaatgcaaaacccatggaggaattctgaagccattgtctccttgagtaccaacagggtcagggaagactgggcctcctgaatttattattgttctttaagaattacaggttgaggtagttgatggtggtaaacattctctcaggagacaataactccagtgatgtttttcaaagattttagcaaaaacagagtaaatagcattctctatcaatatataaatttaaaaaactatctttttgcttacagttttaaattctgaacaatttctcttatatgtgtattgctaatcattaaggtattattttttccacatataaagctttgtctttttgttgttgttgttgtttttaagatggagtttccctctgttgccaggctagagtgcagtggcatgatctcggcttactgcaacctttgcctcccaggtttaagcgattcttctgcctcagcctcccgagtagctgggaccacaggtgcctaccaccatgccaggctaatttttgtatttttagtaaagacagggtttcaccatattggccaggctggtctcgaactcctgaccttgtgatctgcccgcctccattgtgttgttatttgtgagaaagatagatatgaggtttagagagggatgaagaggtgagagtaagccttgtgttagtcagaactctgtgttgtgaatgtcattcacaacagaaaacccaaaatattatgcaaactactgtaagcaagaaaaataaaggaaaaatggaaacatttattcctttgcataatagaaattaccagagttgttctgtctttagataaggtttgaaccaaagctcaaaacaatcaagacccttttctgtatgtccttctgttctgccttccgcagtgtaggctttaccctcaggtgctacacagtatagttctagggtttccctcccgatatcaaaaagactgtggcctgcccagctctcgtatccccaagccacaccatctggctaaatggacatcatgttttctggtgatgcccaaagaggagagaggaagctctctttcccagatgccccagcaagtgtaaccttgcatctcattgctctggctgagttgtgtgcctgtttctgaccaatcactgagtcaggaggatgaaatattcatattgacttaattgcagcttaagttaggggtatgtagaggtattttccctaaagcaaaattgggacactgttatcagaaataggagagtggatgatagatgcaaaataatacctgtccacaacaaactcttaatgctgtgtttgagctttcatgagtttcccagagagacatagctggaaaattcctattgattttctctaaaatttcaacaagtagctaaagtctggctatgctcacagtctcacatctggtgggggtgggctccttacagaacacgctttcacagttaccctaaactctctggggcagggttattcctttgtggaaccagaggcacagagacagtcaactgaggcccaacagaggcctgagagaaactgaggtcaagatttcaggattaatggtcctgtgatgctttgaagtacaattgtggatttgtccaattctctttagttctgtcagcttttgcttcatatattttagcgctctattattagatatatacatgtttagtattatgtcttattggtgcatttactctcttatcattatgtaatgtccttctttatctgtgataattttctgtgttctgaagtctactttgtctaaaaataacatacgcactcaacttccttttctttcttccttcctttctttcttccttcctttctttctctctctctctttccttccttccttcctccttttctctctctctctctctctctctcttttcttgacagactctcgttctgtggccctggctggagttcagtggtgtgatcttggctcactgctacctctaccatgagcaattctcctgcctcagcctcccaagtagctggaactacaggctcatgccactgcgcccagctaatttttgtatttttcgtagagacggggtttcaccacattcgtcaggttggtttcaaactcctgactttgtgatccacccgcctcggcctcccaaagtgctgggattacaggcatgagccatcacacctggtcaactttcttttgattagtgtttttgtggtatatctttttccatcatgttactttaaatatatctatattattgtatttaaaatgtgtttcttacagactgcatgtagttgggtataatttttatccagtctaaaaatatctgtcttttaattggtgtttagacaatttatatttaataaaatggtggaatttaaa

SEQ ID NO: 5539 - DNA, 2383 bp, Homo sapiens; identical to SEQ ID NO: 3214

SEQ ID NO: 5540 - DNA, 5022 bp, Homo sapiens
cggacatggctgcggcccccggaggaggggacgtgaagtgaggagggggttgggaggggagaggacgcgggcgaggaagaccagccccggggccccgatgttgtgactgtgacagactcactggggtttgtacatgctggggaggagccttcctttcaggggtgaccacattcatctgggcatgcctgcagtactcttggcccatggacctgaaggagaagcacctgggcgagcctccctcagccctgggcctgtccacgcggaaggccctcagcgtcctgaaggagcagctggaggcagtgctggaaggacatctcagggagcggaagaagtgtctgacgtggaaggaggtgtggagaagcagcttcctccaccacagtaaccgctgctcctgcttccactggccgggggcctcactcatgctactggccgtgctgctgctgctgggctgctgcgggggacagccagccgggagccgtggggtggggctggtgaatgcctcggccttgttcctgttactgcttctcaaccttgtgctcatcgggcggcaagaccggctgaagcgtcgggaggtagagcggaggctgcgagggatcattgaccaaatccaagatgccctcagggatggcagggagatccagtggcccagtgccatgtatccagacctccacatgccttttgcgccatcctggtccttgcactgggcctacagagacggacacctggtcaacctgccagtcagcctgctggttgaaggagacatcatagctttgaggcctggccaggaatcgtttgcttctctgagggggatcaaggatgacgagcacatcgtcctggagccgggagacctcttcccccccttctcccctccaccctcaccccggggagaagtggagagagggccacagagcccccagcagcaccggcttttccgtgtccttgagacccctgtgattgacaacatcagatggtgcctggacatggccctgtcccgaccagtcactgccctggacaatgagcggttcacagtgcagtcggtgatgctacactatgctgtgcccgtggtcctggccggcttcctcatcaccaatgccctgcgcttcatcttcagtgccccgggggtcacttcctggcagtacaccctcctccagctccaggtgaatggcgtcctgcccatcctccccctgctctttccagtcctctgggttctggcaactgcctgtggagaggcccgtgtcctggcccagatgagcaaggcctcacccagctccctgctggctaagttctcagaggatactctcagcagctatacggaggctgtctcctctcaggaaatgctgcgctgcatttggggccacttcctgagggtgctcggggggacatcgccaacgctgagccacagttccagcctgctgcacagcctgggctctgtcacggtcctgtgctgtgtggacaaacaggggatcctgtcatggccaaatcccagcccagagactgtactgttcttcagcgggaaggtggagccccctcacagcagccatgaggacctcaccgatggcctatccacccgctccttctgccatcccgagccccatgaacgagacgccctcctggctggctccctgaacaacaccctgcacctttccaatgagcaggagcgtggcgactggcctggcgaggctcccaagccccccgagccctattcacaccacaaagcgcatggccgcagcaaacacccatctggctccaacgtgagcttcagcagggacaccgagggtggtgaagaagagcccagcaagacccagcctgggatggagagcgacccctacgaagcagaggactttgtgtgtgactaccacctggagatgctgagcctgtcccaggaccagcagaacccctcctgcatccagtttgatgactccaactggcagctgcacctcacctccctcaaacccctgggcctcaatgtgctgctgaacctgtgtgatgccagcgtcaccgagcgcctgtgccgattctccgaccacctgtgcaacattgccctgcaagagagccacagcgccgtgctgcccgtccatgtgccctggggcctctgcgagcttgcccgcctcattggcttcactcctggggccaaggagcttttcaagcaggagaaccatctggcgctgtaccgcctccccagtgccgagacaatgaaggagacatcgctggggcggctctcctgtgtcaccaagcggcggcctcccctcagccacatgatcagcctcttcattaaagacaccaccaccagcacagagcagatgctgtcccatggcaccgctgatgtggtcttagaggcctgcacagacttctgggacggagctgacatctaccctctctcgggatctgacagaaagaaagtgctggacttctaccagcgagcctgcctgtctgggtattgctctgccttcgcctacaagcccatgaactgcgccctgtcctctcagctcaatggcaagtgcatcgagctggtacaggtgcccggccaaagcagcatcttcaccatgtgcgagctgcccagcaccatccccatcaagcagaacgcccgccgcagcagctggagctctgacgaagggatcggggaggtgctggagaaggaagactgcatgcaggccctgagcggccagatcttcatgggcatggtgtcctcccagtaccaggcccggctggacatcgtgcgcctcattgatgggcttgtcaacgcctgcatccgctttgtctacttctctttggaggatgagctcaaaagcaaggtgtttgcagaaaaaatgggcctggagacaggctggaactgccacatctccctcacacccaatggtgacatgcctggctccgagatccccccctccagccccagccacgcaggctccctgcatgatgacctgaatcaggtgtcccgagatgatgcagaagggctcctcctcatggaggaggagggccactcggacctcatcagcttccagcctacggacagcgacatccccagcttcctggaggactccaaccgggccaagctgccccggggtatccaccaagtgcggccccacctgcagaacattgacaacgtgcccctgctagtgccccttttcaccgactgcaccccagagaccatgtgtgagatgataaagatcatgcaagagtacggggaggtgacctgctgcctgggcagctctgccaacctgcggaacagctgcctcttcctccagagcgacatcagcattgccctggatcccctgtacccatcccgttgctcctgggagacctttggctacgccaccagcatcagcatggcccaggcctcggatggcctttctcccctgcagctgtcagggcagctcaacagcctgccctgttccctgacctttcgccaggaggagaccatcagcatcatccggcttatcgaacaggctcggcatgccacctatggcatccgtaagtgcttcctcttcctgctgcagtgccagctgactcttgtggtcatccagttcctttcttgcctggtccagctgccgccactcctgagtaccaccgacatcctgtggctgtcctgcttttgctaccctctgctcagcatctctctgctggggaagcccccccatagctccatcatgtctatggcaacggggaaaaacctccagtccattcccaagaagacccagcactacttcctgctctgcttcctgctcaagttcagcctcaccatcagctcctgcctcatctgctttggcttcacactgcagagcttctgtgacagctcccgggaccgcaacctcaccaactgctcctccgtcatgctgcccagcaacgacgacagggctccagcctggtttgaggactttgccaatggactgctgtcggctcagaagctcacggccgccctgattgtcctgcacactgtcttcatttccatcacccatgtgcatcgcaccaagcccctgtggagaaagagccccttgaccaacctctggtgggccgtgacagtgcctgtggtgctgctgggtcaggtggtccagacggctgtggacctgcagctgtggacacacagggacagccacgtccactttggcctggaggacgtgcccctgctgacatggctcctgggctgcctgtccctggtccttgtggtggtgaccaatgagatcgtgaagctacatgagattcgggtccgagtccgctaccagaagcgacagaagctgcagtttgaaactaagctgggcatgaactctcccttctgagccactggctgtggtggctgtagttgcccccgtccctggggctaaagccagacccatttctgaacaggggagtttgtatcatgaatgtttccaggtttgctcctgcacccgtggcactggaaacccagctccccgtgtcagaccccgctgtcttcctgagccctggggctcactgtggaggagctgacggcctgggcccttggccagtcctggctcttccctgggcctcaccagggacactcttgaatgtatggcctcaggcgctccctagaggggccctaaaccccctcacctgtgagctaccccctttagggatcccttgcccccttggagatcccttgccccccagtgcctctgctcgtgggtccctggacacggccttgaagccaaccttctttggaggagcaacagcagcagccttggccgacgcgtccaactcccaaggctgccgtggagggcaggggggtggtgcttgcctggatgtggccccgagtgcctcccctccctccctctgtgggggagtctcccgcctgaacctgaagatggagcagggcccccgcttcgccctggagcctcttcctgtgcctggctcaagctggctgcctgtcagtcttggggaatctggcccaggtctcctcagcctctgccccagttctgggagaagtttctactggtgtatattttttactggaaatgagccttttaggaatgaatgtagactggtttgtattaaaatgtgtcaattgct

SEQ ID NO: 5541 - DNA, 6611 bp, Homo sapiens; identical to SEQ ID NO: 2018

SEQ ID NO: 5542 - DNA, 7819 bp, Homo sapiens
ggatctgatactgcccaccatacagaagtccttactgaggagtccagagaatgttattgaaactatttctagtctgctggcatcagtgacgcttgacctcagccagtatgccatggacatcgtgaaaggactggctggtcacctgaaatccaacagtccccgcctgatggatgaagctgtgctggcactgcggaacctggcacgccagtgcagtgactcttcggccatggaatccctgaccaagcacctatttgctatcctcggaggctcggaaggaaaactaactgttgtagcccagaagatgagcgtcctctcagggattgggagcgtcagtcatcacgtggtgtctggaccttccagtcaggtcctgaatgggatcgtggctgagctgttcatcccgttccttcagcaggaagttcatgaagggaccttggtacacgctgtctcagtcctggctctctggtgtaaccgattcactatggaagtgcccaagaagctcactgaatggttcaaaaaagctttcagccttaaaacctccacatctgcggtgaggcatgcctacctgcagtgcatgttggcctcttaccggggtgacacgctgttgcaggccctggacttactgcccttgctcatccagacagtggagaaggcagcctcccaaagcactcaggttcccaccatcaccgaaggggttgccgcagccttgttgctcttaaagttgtcagtggctgactcacaggctgaggccaaactgagcagtttctggcagttgattgtggatgagaaaaagcaggttttcacttctgagaaattcctggtcatggcttcagaggatgccctgtgtactgtgttgcatctgacagagagacttttccttgaccacccgcatagactcactggcaacaaagttcagcagtaccaccgggctctggtggcggtgctcctgagccgcacctggcacgtccgcaggcaggctcagcagacagttcggaagctgctgtcctctcttgggggctttaagctggcgcacggactcttggaggagctgaagactgtcctcagttctcacaaggtgctgcccttagaggctttggtgactgatgctggagaggtgactgaggcaggcaaggcctacgtgcctccacgggtcctgcaggaggctctgtgtgtcatctccggtgtgccagggctcaagggtgatgtcaccgacactgaacaactggcccaggaaatgctgatcatctcccaccacccatccttagttgccgtgcagtctggactttggccagcacttcttgccaggatgaagatcgatcctgaagcctttatcaccaggcacctggatcagatcattcccaggatgaccacacagagtcccctaaaccagtcctccatgaatgccatgggctccctttccgtcctgtcgccggaccgggtcctcccacagctcatcagcaccatcactgcctccgtgcagaaccctgcactgcgcctggtgacgcgggaggagtttgccattatgcagacccctgctggggagctgtatgacaaatccatcattcagagtgcccagcaggacagcataaaaaaggccaacatgaagcgagagaacaaagcttattccttcaaagagcagatcatcgagctggagctgaaggaggagataaagaagaagaaaggcatcaaagaggaggtgcagctgaccagcaagcagaaggagatgctgcaggcccagctagacagggaggcgcaggtccggaggcggctgcaggagctggatggggagctggaggcggcgcttggactgctggacatcatcctggccaagaacccgtccggcctgacccagtacatccctgttttggtcgactcttttctgcccttgctgaagtctcccctggctgctcccaggatcaagaaccccttcttgtccttggctgcctgtgtcatgccctctaggctcaaggctttgggcactttggtgagccacgtgaccctgcgcctgctgaagccagagtgtgtcctggataagtcctggtgccaggaagagctgtcggtggctgtgaagagggcggtgatgctgctgcacacccacaccatcaccagcagggtgggcaagggggagccaggtgctgcgcccttgtccgcgccagccttctccttagtcttcccgtttctgaagatggtgctgacggagatgccccaccacagtgaggaggaggaggagtggatggcccagattcttcagatcctcactgtccaagcccagctgagggcctcccccaacaccccacccgggcgggtggacgagaatggcccggagttgctgcctcgcgtggccatgctgcgtcttctgacttgggtgatcgggacgggctcgcctcgcttacaggttctggcttcagacaccctgaccaccctgtgtgccagcagcagtggtgatgatggctgtgcctttgcagagcaggaggaggtggacgtgctgctctgtgccttgcagtccccgtgtgccagcgtgcgggaaaccgtgctccgggggctgatggaactccacatggtattgccagcacctgatactgatgagaagaatggcctgaaccttctgcggagactctgggtggtcaagtttgacaaggaggaggagatccggaagctggctgagaggctctggtcaatgatgggcctagacctgcagccagacctctgctccttgctgattgacgacgtgatctatcatgaggcggctgtaaggcaggcaggggccgaagccctctcccaagcagtggcacgttaccagcggcaggcggcggaggttatgggcaggctcatggagatttaccaggaaaagctctaccggccgcccccagtgctggatgctttgggacgagttatttcagaatctcctccagatcagtgggaagccaggtgtggcttggcgttggccctcaacaagctctcccagtatttggacagctctcaggtgaagccactctttcagttttttgtccctgatgccctcaatgaccgacacccagatgtccggaagtgcatgttggatgcagccctcgcaacgctcaacactcatgggaaggagaacgtcaactcgctgttgccagtattcgaggagttcctgaagaacgcgcccaatgatgccagctacgatgctgtgcgacagagtgtggtggtcctgatgggctctctggccaagcacctggacaagagtgaccccaaagtgaagcccattgttgccaagctcatcgctgccctctccaccccctcccagcaggtccaggagtccgtagccagctgcttgccacccctcgtgccagccatcaaggaggatgctggagggatgatccagaggcttatgcagcagctgctggagtcagacaagtacgcagagcgcaaaggggccgcgtatggcctggcgggcctggtgaagggcctgggcatcctctcgctgaagcaacaggagatgatggcggcactgactgatgccatccaagataagaagaacttccgccggcgagagggagccctctttgccttcgagatgctctgcaccatgctggggaaactttttgagccgtatgtggttcacgtgctgccccatctgctcctgtgctttggggatggaaaccagtatgtgcgtgaggctgcagatgactgtgccaaggctgtgatgagcaacttgagtgctcacggggtgaagctggtgctcccctccttactggctgccctggaggaggaatcgtggcggaccaaagctgggtcagtggagcttcttggggcaatggcgtactgtgctcctaagcagctgtcatcctgtctacccaacattgtgcccaagcttacggaggtgctgaccgactcccatgtcaaagtccagaaggctggacagcaggcgctcaggcagatcggctccgttatcaggaacccggagatcctggccattgctccagtcctcctggatgccctgacggatccctccaggaagacccagaagtgcttgcagaccctgctggacaccaagtttgtccacttcattgatgccccatccctggccctcatcatgcccattgtccagagagccttccaggaccgttccacggacacgcggaagatggcagcccagattattggcaacatgtactccctgacagaccagaaggacttggctccgtacctgcccagcgtgacgcctggcctgaaagcatcgcttttggaccctgtgcctgaggtgcggaccgtatctgcaaaggcccttggggccatggtgaagggcatgggggagtcgtgctttgaggacttgctgccgtggctgatggagacactgacctatgagcagagctctgtggatcgctcaggcgctgcacaggggttggctgaggtcatggccggtttgggggtggagaagttggagaagttgatgccagaaatcgtggctacagccagcaaagtggacattgcaccccatgtccgagatggctacattatgatgtttaactacctgcccatcacctttggagacaagtttactccttatgtggggcccatcatcccctgtatcctcaaagctcttgctgatgagaatgagtttgtgcgtgacaccgccctgcgcgcgggccagcgggttatctccatgtacgctgagacagccatcgccctgctgctgccccagctagagcaaggcctctttgatgacctttggagaatcaggttcagctctgttcagctccttggggatctcctgtttcacatctcaggagtcactgggaagatgaccacagaaactgcctctgaggatgataactttggaactgcccagtccaacaaggcgatcatcactgccctgggggtagagcggcggaaccgggtgttggcagggctgtacatgggccgctcagacacccagctggtggtgcggcaggcgtccctgcatgtctggaagattgttgtctccaataccccccgcaccttgcgtgagatcctacccactctctttgggctcctgctgggtttcctggccagcacgtgtgcagataagagaacgattgcagcgagaacattgggagatcttgtgcggaagttaggggagaaaatcctccccgagatcatccccatccttgaggaaggcctgaggtctcagaagagcgatgagaggcagggtgtgtgcattggcctaagtgagatcatgaagtccaccagccgggatgccgtgctgtatttctctgaatccctcgtgcccacggcaaggaaggctttgtgtgacccactggaggaggtcagagaggcggcagccaagactttcgagcagctgcattccaccatcggccaccaggctctggaggacattctcccatttttactaaagcagctggatgacgaggaggtgtcagagtttgccttggatggtctgaagcaagtcatggctattaagagtcgtgtggtgctgccctaccttgtgcccaagctgacaacgccacctgtcaacacccgggtgctggctttcctttcgtcagtggctggtgatgccctcacccgtcatcttggcgtgatcctcccagcggtcatgctggccctgaaggaaaagcttgggaccccagatgagcagctggagatggccaattgtcaggctgtgatcctctccgtagaggatgacacagggcaccggatcatcatcgaggatctgctggaggccacccgcagccctgaggtgggcatgaggcaagctgctgccatcatcctcaacatctactgttcccgctcaaaggctgactacaccagccacctgcggagcctggtctcgggcctgatccgcctcttcaatgactccagccctgtggttctggaggagagctgggatgccctaaatgccatcactaagaagctggatgctggcaaccagttggcactcattgaagagctgcacaaggaaatccggctcatagggaacgagagcaaaggcgagcatgtgccaggattctgcctcccgaagaagggagtgacctccatccttccagtgttgcgggaaggagtcctgactggcagccctgagcagaaggaggaggcagccaaagccttaggcttggtaatccgcctgacctcggctgacgccctgaggccctccgtggtcagcatcactggccctctgatccgcatcctgggggacaggttcagctggaatgtgaaggcggctctgctcgagacactcagcctcttgttggctaaggttgggattgccctgaagcccttcctgccccagctgcagaccactttcaccaaagccctgcaggactccaaccggggggtgcgcctgaaggccgcagatgctctggggaagctcatttccatccacattaaggtggaccccctcttcacagagctgctcaatggcatccgcgccatggaggacccaggtgtcagggacaccatgctgcaggccctgaggtttgtgattcagggagcaggggccaaagtggatgccgtcatccggaaaaacatcgtctcactcctgctgagcatgctgggacacgatgaggacaacactcgcatctcctcagccgggtgcctaggggaactgtgtgcctttttgactgaagaggagcttagtgccgttctacagcagtgcttgctggcggacgtgtccggcattgactggatggttcggcacgggcggagcctggcactttccgtggctgtgaatgtggctcctggcagactttgtgccggcagatatagcagtgatgttcaggaaatgatcctgagcagtgccacggcggacaggatccccattgcggtgagcggggtccggggcatgggctttctcatgagacaccacatcgagacaggcggagggcagttgccggccaaactttccagcctgttcgttaagtgtctgcagaacccatccagcgacatcaggctggtggctgagaagatgatctggtgggcaaataaggacccactgcctcccctggacccccaggccatcaagcccatcctgaaggctcttcttgacaacaccaaggataagaacaccgtggtcagggcctacagcgaccaggcaattgtcaacctcctcaagatgcggcagggtgaagaggtgtttcagtccctctccaagatcctggatgtggccagtttggaggtgctgaacgaggttaaccgaaggtccctgaagaagctggccagccaggccgactccacggagcaggtggacgacaccatcctgacatgagaggcctgggccagcagcagcattgccgctccacatctttgctcaatgttttcatttttgaaaatacatttgttccaatggggagcttggaagatggcgttcccagaaagtattttaatatcaatagaccacagccaaagccttaaatcaaacccacacacaactgaaaattgcctcctccatctctcaccttttcctgtggagaagagaaggaaaagcacacgcatgcgcctcagcaaatggcagcccaggagctgtttgtccagtttagcatggctaggtctggaactataatagcagggtcagactgtgggttcctcttctcctgtgcttgagctctggtttgagagctggcgctaccaacctttttcctatatcccgagtggggcacagacggtggatctctgcccagtgtggtgtgtctggcttggcttttcaatattgtgaggtctgaatggatctgacccctgtcagatgaaaatgattcacagctctggcagttcccaagtctggggaggggtataggtttgaaaggctgtttgaaagaggaatgtttaataaaggctttgatttaatctt

SEQ ID NO: 5543 - DNA, 5878 bp, Homo sapiens
caaaacatagagtaccccggcagccggcaagaggaagagagagtggcttccacatccccaatatcctagaggcggctgagccggaggcggtcgcacaaagcgggccccgggggccgttccagccgcggccgaccatagagatgcggctcccgccggctctgggtctggagataggaaagctgaggcccagagaagcgaagcgactgtgtctgtccaagaccacgcgccctcctgcccggaagataagcgtatttcttctctggtgcccacctgtctcctacctcaccctgccctcccgcaggtgaaggttcttaatcttgacggctcagcgtcctccttggctccccccggaggccatgtatggtcaagcttgaagattccccagaacaacgctaatattcacatttaagaagccaaaacacacaagtcggtggtgatgacagacccccttttggactcacagccagccagtagcaccggggagatggatggactgtgccctgagctattgctgatccccccgcctctctctaaccgtggaatcctggggcctgtccagagcccctgtccttcccgggaccctgcacctatacctactgagccaggctgcctgctggtagaggccacagcaactgaagagggaccagggaacatggagatcattgtggagacagtagctggaaccctgaccccaggtgctcctggagagaccccagctcccaaactgcctccaggagagagagaaccttcacaggaagcaggtacacccttgcctgggcaggagacagctgaagaggagaatgtagagaaagaagagaagagtgacacccagaaggactcccaaaaggctgtggataaaggccaaggggctcagcggctggaaggggatgtggtctctggcaccgagtccctcttcaagacccatatgtgtccagagtgtaagcgctgctttaagaagcggactcatctggtggagcacctgcatctccacttcccagaccccagcctccagtgccctaactgccagaagttcttcaccagtaagagcaagctcaagacccatctgctgcgggagctgggtgaaaaggcccaccactgcccactgtgccactacagtgcggtggagaggaatgcactcaaccgccacatggccagcatgcatgaagatatttccaacttctactcagacacctatgcctgtcctgtctgccgtgaggaattccgcctcagccaggccctaaaggagcacctcaagagccacacggcagcagccgcagcagagccattaccccttcgctgctttcaggagggctgcagctatgcagcacccgaccgcaaggccttcattaagcacctgaaggagacccatggggtgcgggctgtggagtgccgccatcactcatgtcccatgctctttgccacagccgaagccatggaggcccaccacaagagtcactacgccttccactgcccccactgtgattttgcttgttccaataagcacctattccgtaaacacaagaagcagggccaccctggcagtgaagagctgcgctgcaccttctgcccctttgccaccttcaacccagtggcttaccaggatcatgtaggcaagatgcatgctcatgaaaagatccaccagtgtcctgagtgcaactttgccactgcccacaagagggtgctcatccgacacatgcttctacatacgggtgagaagccccacaagtgtgagctgtgtgacttcacatgccgagacgtgagctacctatccaagcacatgctgacccactccaacaccaaggattacatgtgcactgaatgtggctatgtcaccaagtggaagcactacctccgtgtgcacatgcgaaaacatgcaggggacctcaggtatcagtgcaaccagtgctcctatcgctgtcaccgggctgatcagctgagcagccacaagctgcggcatcagggcaagtctctgatgtgtgaggtgtgtgccttcgcctgcaagcggaagtatgagctgcagaagcacatggcttcccagcaccaccctggcacaccgtccccactctacccttgccactactgcagttaccagagccgccacaagcaggctgtgctgagccatgagaactgcaagcatacccgcctccgtgagttccactgtgccctctgtgactaccgcaccttcagcaacaccacactcttgttccataaacgcaaggcccatggctatgtacctggagaccaggcctggcagctccgctatgcaagccaggagccagaaggggccatgcagggcccaacacccccaccagattcagagccctcaaaccagctgtcagcccgacctgaggggccaggtcacgaacctgggactgtggtggaccccagcttggaccaggccctgccagagatgagtgaggaggtcaacactggaagacaggagggcagtgaggctccccatgggggtgacctgggtggcagtcccagcccagcagaggtggaggagggcagctgcacactacacctagaggccctgggagtagagctggagtctgtgactgagccaccccttgaggaggtcactgaaacagcccctatggagttcaggcccctgggactggaagggccagatggactggaaggaccagagctatctagctttgaaggtattgggacttctgacttgggtgctgaagaaaatccccttctggaaaagccagtgtctgagccctccacaaatcctccatccttagaggaggctcctaacaactgggtaggaaccttcaagacaactccacctgctgagacagcacccttgcccccattacctgagtcagagtcattactcaaggccctaaggagacaggacaaagaacaagcagaggcattggtgctagaggggcgggtgcagatggtagtgatccagggagaggggcgagccttccgctgcccacactgcccttttatcactcgccgggagaaggccctgaatctgcactccaggactgggtgccaaggccgccgagagcccctgctgtgccccgagtgtggggctagcttcaagcaacaacgcggcctcagcacccacctgctgaagaagtgccctgttctactcagaaagaacaagggcttgcccagaccagattcacccatccctctgcaacctgtgctcccaggtacccaggcctcagaggacacagaaagtgggaagcccccacctgcatcacaagaagcagagctactgcttccaaaagatgctcctttggagcttcccagggagccagaagaaacagaagagcctcttgccacagtctctggttccccagtccctcctgcaggaaactccttgcccacagaggcccctaagaagcactgctttgacccagtccctcctgcaggaaactcctcacccacggaggcccctaagaagcaccaccttgacccagtccctcctgcaggaaactcctcacccacagaggccctgaagaagcaccgctttgagcagggcaagtttcactgcaactcctgcccattcctttgttcccggctctcctctattacctctcacgtggctgaaggctgcagggggggacgtggcgggggaggaaaacgagggaccccccagacccagcctgatgtgtccccgttgagcaatggggactctgctcccccgaagaatgggagtacagagtccagctctggtgatggggatacagttctggttcaaaagcagaagggggctcgcttctcctgccctacatgtccctttagctgccagcaggaacgggctctgaggactcaccagatccggggctgccccctcgaggagtctggagagctgcactgcagcctctgcccattcactgctcctgctgccactgccttaaggctccaccagaagcggaggcaccccactgcagccccagcccgtgggccccggccccatctacagtgtggggactgtggcttcacctgtaaacagagccgttgcatgcagcagcaccggcggctcaagcacgagggggtgaagccccatcagtgccccttctgtgacttttcgaccaccagacggtaccggttagaggctcaccagtcccgacacacaggcattggccgcatcccctgcagctcttgcccccagacgtttggtaccaactcgaaactgcgcttgcaccggttaagggtacatgacaaaacacctacccacttctgtccactttgtgactatagtggctaccttcgccatgacatcactcgtcatgtcaacagctgccaccaaggcaccccagcctttgcctgctcccagtgtgaagcccagttcagctcagagacagcacttaagcagcatgctctgcgccgacaccccgagcctgcacagcctgcccctggctctcctgcagagaccactgagggccccctgcactgttcccgctgtgggttgctgtgccccagccctgccagcttacgaggacacacccgtaaacagcacccacggcttgagtgtggggcctgccaggaggccttccctagccgactggctctggatgagcaccggaggcagcagcatttcagccaccgctgtcagctctgtgactttgctgcccgggagcgggtgggcctggtaaagcactacctggaacagcatgaggagacttcagcagccgtggcagcctcagatggggatggggatgctggccagcccccgctacactgccccttttgtgacttcacatgccgccatcagctggtactagatcaccatgtgaaagggcatgggggcactcgtctctacaagtgcaccgattgtgcttacagcaccaagaaccgacagaagatcacctggcacagccgcatccacactggggaaaagccttaccactgtcacctctgcccctatgcctgtgctgatccctctcgtctcaagtaccacatgcggatccacaaggaggaacggaagtacctgtgccctgagtgtggctacaagtgcaagtgggtcaaccagctgaaataccacatgaccaagcatacaggactgaagccataccagtgtcccgagtgtgagtactgcaccaaccgggctgatgcactgcgtgtgcaccaggagacccggcatcgagaagcacgggctttcatgtgtgagcagtgtggcaaggccttcaagacgcgcttcctgctgcgcacccaccttcgcaagcacagtgaggccaaaccctatgtgtgcaatgtgtgccaccgtgctttccgctgggctgctggcctgcgccatcatgccctcacccacaccgaccgccaccccttcttttgccgcctctgcaactacaaggccaagcaaaagttccaggtggtcaagcacgtacgcaggcaccaccctgaccaagccgacccaaaccagggtgtgggcaaagaccccaccacccccacagtgcacctgcatgatgtgcagctggaggatcccagccctcctgctcctgccgctccccacactggacctgagggctgaaagcctgccccacctcctgtataggaagagggtatggtctgagatgtgcagactgggaccagcgctagcctgaggagctcagagcctaaggaaagactggcttttggggtacaagggtgactagaaccttcctgggactctggctatagtactttgaaattatcacccatataaaagagggacatggactataacgttgatttcttattgctgtacattgcgtttttaacctgcaagttctcagtttcttcaccatcactccatcaaagtccctggctataagatctggattttacccactccatcttctctttccttcttactgtgtcaattcctattttctttcagaatcttctaaaaacagttgtatctaaccgc

SEQ ID NO: 5544 - DNA, 1555 bp, Homo sapiens
ccggatggtgcaggaagcgccagctgcgctgcccacggagccaggccccagccccgtgcctgccttcctcggcaagctatgggcgctggtgggggacccaggcacagaccacctgatccgctggagcccgagcgggaccagtttcctcgtaagcgaccagagccgtttcgccaaggaagtgctgccccagtatttcaagcatagcaacatggcgagcttcgtgcgccaactcaacatgtacggttttcggaaggtggtgagcatcgagcagggcggcctgcttaggccggagcgcgaccacgtcgagttccagcacccgagcttcgtgcgcggccgcgagcagctactggagcgcgtgcggcgcaaggtgcccgcgctgcgcggcgacgacggccgctggcgcccggaggacctgggtcgactactgggcgaggtgcaggctttgcggggagtgcaggagagcaccgaggcgcggctgcgggagctcaggcagcagaacgagatcttgtggcgggaggtggtgacacttcggcagagccacggtcagcagcaccgggtcattggcaagctgatccagtgtctctttgggccacttcaggcggggccgagcaatgcaggaggcaagagaaagctgtccctgatgctggatgaggggagctcatgcccaacacctgccaagttcaacacctgccctctacctggtgcccttctgcaggacccctacttcatccagtcgccttctacttacagcctctcccagagacaaatttgggccttagccctcacagggccaggggccccatcatctctgacatcccagaagactctccatcccctgaggggaccaggctttctccctccagtgatggcaggagcccccccgccactgcctgtggctgtggtgcaggccatcctggaagggaaagggagcttcagccccgaggggcccaggaatgcccaacagcctgaaccaggggatcccagggagatacctgacagggggcctctgggcctggaaagcggggacaggagcccagagagtctgctgcctccgatgctgcttcagccccctcaagaaagtgtggaacctgcagggcctctagatgtgctgggccccagtctccaagggcgagaatggaccctgatggacttggacatggagctgtccttgatgcagcccttggttccagagcggggtgagcctgagctggcggtcaaggggttaaattctccaagcccagggaaggaccccacgctcggggccccactcctgctggatgtccaggcggccttgggaggcccagccctgggcctgcctggggctttaaccatttatagcactcctgagagccggactgcctcctacttgggcccggaagccagtccctccccctaagaccccgcgcctctgaaggggcttggaaccagtccgccgctgcacatccttcttggcttcctggccgcctacgggggtgagcgaagcccccactactaaatggcctctctccactaccccgactatccctgcacataaactccgtttttttttttcacc

SEQ ID NO: 5545 - DNA, 1077 bp, Homo sapiens
aggatcccaaggcccaactccccgaaccactcagggtcctgtggacagctcactagcggcaatggctgcaggctcccggacgtccctgctcctggcttttggcctgctctgcctgtcctggcttcaagagggcagtgccttcccaaccattcccttatccaggctttttgacaacgctatgctccgcgcccgtcgcctgtaccagctggcatatgacacctatcaggagtttgaagaagcctatatcctgaaggagcagaagtattcattcctgcagaacccccagacctccctctgcttctcagagtctattccaacaccttccaacagggtgaaaacgcagcagaaatctaacctagagctgctccgcatctccctgctgctcactcagtcatggctggagcccgtgcagctcctcaggagcgtcttcgccaacagcctggtgtatggcgcctcggacagcaacgtctatcgccacctgaaggacctagaggaaggcatccaaacgctgatgtgggtgagggtggcaccagggatccccaatcctggggccccactggcttccagggactggggagagaaacactgctgccctctttttagcagtcaggcgctgacccaagagaactcaccgtattcttcatttcccctcgtgaatcctccaggcctttctctacaacctggaggggagggaggaaaatggatgaatgagagagggagggaacagtgcccaagcgcttggcctctccttctcttccttcactttgcagaggctggaagatggcagcccccggactgggcagatcttcaatcagtcctacagcaagtttgacacaaaatcgcacaacgatgacgcactgctcaagaactacgggctgctctactgcttcaggaaggacatggacaaggtcgagacattcctgcgcatcgtgcagtgccgctctgtggagggcagctgtggcttctagctgcccgggtggcatccctgtgacccctccccagtgcctctcctggtcgtggaaggtgctactccagtgcccaccagccttgtcctaataaaattaagttgcatcattt

SEQ ID NO: 5546 - DNA, 2725 bp, Homo sapiens
gatggcgccgagccgggtgagcagcgtctcggctgccgctagagttttcctgctccccgcgctcgggtggcgggggcgggtctgagtggtaccccggaggagaccctttgaaggtcccttgtggggactggaaagaggacggttggttgtgtgtctgtgctcgtggggaccccgtgtgtgtgcctgcattggagagatgttgcaggagatggggtgggctctctgaacctcctttcgcgctgcccggggatcttcgacctgcttctctgctgggatctcgcttaagttaacccttccctgggacgccttcctgccgcctccactgatctgaggagatcctgtgactgtagcgtgttttatgagcctttactggcagagggtaccgccgggtattgaaggattcgtaggagttcgccagggaagtgggacacgaccccctcttgtaaacccggcgccaggcacagaggtctccgtctctccaccgggggcttcatccttccagggaggagaagagggactccagaatggctgaggagaagaagctgaagcttagcaacactgtgctgccctcggagtccatgaaggtggtggctgaatccatgggcatcgcccagattcaggaggagacctgccagctgctaacggatgaggtcagctaccgcatcaaagagatcgcacaggatgccttgaagttcatgcacatggggaagcggcagaagctcaccaccagtgacattgactacgccttgaagctaaagaatgtcgagccactctatggcttccacgcccaggagttcattcctttccgcttcgcctctggtgggggccgggagctttacttctatgaggagaaggaggttgatctgagcgacatcatcaatacccctctgccccgggtgcccctggacgtctgcctcaaagctcattggctgagcatcgagggctgccagccagctatccccgagaacccgcccccagctcccaaagagcaacagaaggctgaagccacagaacccctgaagtcagccaagccaggccaggaggaagacggacccctgaagggcaaaggtcaaggggccaccacagccgacggcaaagggaaagagaagaaggcgccgcccttgctggagggggcccccttgcgactgaagccccggagcatccacgagttgtctgtggagcagcagctctactacaaggagatcaccgaggcctgcgtgggctcctgcgaggccaagagggcggaagccctgcaaagcattgccacggaccctggactgtatcagatgctgccacggttcagtacctttatctcggagggggtccgtgtgaacgtggttcagaacaacctggccctactcatctacctgatgcgtatggtgaaagcgctgatggacaaccccacgctctatctagaaaaatacgtccatgagctgattccagctgtgatgacctgcatcgtgagcagacagttgtgcctgcgaccagatgtggacaatcactgggcactccgagactttgctgcccgcctggtggcccagatctgcaagcattttagcacaaccactaacaacatccagtcccggatcaccaagaccttcaccaagagctgggtggacgagaagacgccctggacgactcgttatggctccatcgcaggcttggctgagctgggacacgatgttatcaagactctgattctgccccggctgcagcaggaaggggagcggatccgcagtgtgctggacggccctgtgctgagcaacattgaccggattggagcagaccatgtgcagagcctcctgctgaaacactgtgctcctgttctggcaaagctgcgcccaccgcctgacaatcaggacgcctatcgggcagaattcgggtcccttgggcccctcctctgctcccaggtggtcaaggctcgggcccaggctgctctgcaggctcagcaggtcaacaggaccactctgaccatcacgcagccccggcccacgctgaccctctcgcaggccccacagcctggccctcgcacccctggcttgctgaaggttcctggctccatcgcacttcctgtccagacactggtgtctgcacgagcggctgccccaccacagccttcccctcctccaaccaagtttattgtaatgtcatcgtcctccagcgccccatccacccagcaggtcctgtccctcagcacctcggcccccggctcaggttccaccaccacttcgcccgtcaccaccaccgtccccagcgtgcagcccatcgtcaagttggtctccaccgccaccaccgcaccccccagcactgctccctctggtcctgggagtgtccagaagtacatcgtggtctcacttcccccaacaggggagggcaaaggaggccccacctcccatccttctccagttcctcccccggcatcgtccccgtccccactcagcggcagtgccctttgtggggggaagcaggaggctggggacagtccccctccagctccagggactccaaaagccaatggctcccagcccaactccggctcccctcagcctgctccgtgatgctccacctgccagcccccggattcccacacatgcagacatgtacacacgtgcacgtacacacatgcatgctcgctaagcggaaggaagttgtagattgcttccttcatgtcactttctttttagatattgtacagccagtttctcagaataaaagtttggtttgt

SEQ ID NO: 5547 - DNA, 14136 bp, Homo sapiens
gcactgcagcgccagcgtccgagcgggcggccgagctcccggagcggcctggccccgagccccgagcgggcgtcgctcagcagcaggtcgcggccgcgcagccccatccagccccgcgcccgccatgccgtccgcgggccccgcctgagctgcggtctccgcgcgcgggcgggcctggggacggcggggccatgcgcgcgctgccctaacgatgccgcccgccgcgcccgcccgcctggcgctggccctgggcctgggcctgtggctcggggcgctggcggggggccccgggcgcggctgcgggccctgcgagcccccctgcctctgcggcccagcgcccggcgccgcctgccgcgtcaactgctcgggccgcgggctgcggacgctcggtcccgcgctgcgcatccccgcggacgccacagcgctagacgtctcccacaacctgctccgggcgctggacgttgggctcctggcgaacctctcggcgctggcagagctggatataagcaacaacaagatttctacgttagaagaaggaatatttgctaatttatttaatttaagtgaaataaacctgagtgggaacccgtttgagtgtgactgtggcctggcgtggctgccgcgatgggcggaggagcagcaggtgcgggtggtgcagcccgaggcagccacgtgtgctgggcctggctccctggctggccagcctctgcttggcatccccttgctggacagtggctgtggtgaggagtatgtcgcctgcctccctgacaacagctcaggcaccgtggcagcagtgtccttttcagctgcccacgaaggcctgcttcagccagaggcctgcagcgccttctgcttctccaccggccagggcctcgcagccctctcggagcagggctggtgcctgtgtggggcggcccagccctccagtgcctcctttgcctgcctgtccctctgctccggccccccgccacctcctgcccccacctgtaggggccccaccctcctccagcacgtcttccctgcctccccaggggccaccctggtggggccccacggacctctggcctctggccagctagcagccttccacatcgctgccccgctccctgtcactgccacacgctgggacttcggagacggctccgccgaggtggatgccgctgggccggctgcctcgcatcgctatgtgctgcctgggcgctatcacgtgacggccgtgctggccctgggggccggctcagccctgctggggacagacgtgcaggtggaagcggcacctgccgccctggagctcgtgtgcccgtcctcggtgcagagtgacgagagccttgacctcagcatccagaaccgcggtggttcaggcctggaggccgcctacagcatcgtggccctgggcgaggagccggcccgagcggtgcacccgctctgcccctcggacacggagatcttccctggcaacgggcactgctaccgcctggtggtggagaaggcggcctggctgcaggcgcaggagcagtgtcaggcctgggccggggccgccctggcaatggtggacagtcccgccgtgcagcgcttcctggtctcccgggtcaccaggagcctagacgtgtggatcggcttctcgactgtgcagggggtggaggtgggcccagcgccgcagggcgaggccttcagcctggagagctgccagaactggctgcccggggagccacacccagccacagccgagcactgcgtccggctcgggcccaccgggtggtgtaacaccgacctgtgctcagcgccgcacagctacgtctgcgagctgcagcccggaggcccagtgcaggatgccgagaacctcctcgtgggagcgcccagtggggacctgcagggacccctgacgcctctggcacagcaggacggcctctcagccccgcacgagcccgtggaggtcatggtattcccgggcctgcgtctgagccgtgaagccttcctcaccacggccgaatttgggacccaggagctccggcggcccgcccagctgcggctgcaggtgtaccggctcctcagcacagcagggaccccggagaacggcagcgagcctgagagcaggtccccggacaacaggacccagctggcccccgcgtgcatgccagggggacgctggtgccctggagccaacatctgcttgccgctggacgcctcttgccacccccaggcctgcgccaatggctgcacgtcagggccagggctacccggggccccctatgcgctatggagagagttcctcttctccgttgccgcggggccccccgcgcagtactcggtcaccctccacggccaggatgtcctcatgctccctggtgacctcgttggcttgcagcacgacgctggccctggcgccctcctgcactgctcgccggctcccggccaccctggtccccaggccccgtacctctccgccaacgcctcgtcatggctgccccacttgccagcccagctggagggcacttgggcctgccctgcctgtgccctgcggctgcttgcagccacggaacagctcaccgtgctgctgggcttgaggcccaaccctggactgcggatgcctgggcgctatgaggtccgggcagaggtgggcaatggcgtgtccaggcacaacctctcctgcagctttgacgtggtctccccagtggctgggctgcgggtcatctaccctgccccccgcgacggccgcctctacgtgcccaccaacggctcagccttggtgctccaggtggactctggtgccaacgccacggccacggctcgctggcctgggggcagtgtcagcgcccgctttgagaatgtctgccctgccctggtggccaccttcgtgcccggctgcccctgggagaccaacgataccctgttctcagtggtagcactgccgtggctcagtgagggggagcacgtggtggacgtggtggtggaaaacagcgccagccgggccaacctcagcctgcgggtgacggcggaggagcccatctgtggcctccgcgccacgcccagccccgaggcccgtgtactgcagggagtcctagtgaggtacagccccgtggtggaggccggctcggacatggtcttccggtggaccatcaacgacaagcagtccctgaccttccagaacgtggtcttcaatgtcatttatcagagcgcggcggtcttcaagctctcactgacggcctccaaccacgtgagcaacgtcaccgtgaactacaacgtaaccgtggagcggatgaacaggatgcagggtctgcaggtctccacagtgccggccgtgctgtcccccaatgccacgctagcactgacggcgggcgtgctggtggactcggccgtggaggtggccttcctgtggaactttggggatggggagcaggccctccaccagttccagcctccgtacaacgagtccttcccggttccagacccctcggtggcccaggtgctggtggagcacaatgtcatgcacacctacgctgccccaggtgagtacctcctgaccgtgctggcatctaatgccttcgagaacctgacgcagcaggtgcctgtgagcgtgcgcgcctccctgccctccgtggctgtgggtgtgagtgacggcgtcctggtggccggccggcccgtcaccttctacccgcacccgctgccctcgcctgggggtgttctttacacgtgggacttcggggacggctcccctgtcctgacccagagccagccggctgccaaccacacctatgcctcgaggggcacctaccacgtgcgcctggaggtcaacaacacggtgagcggtgcggcggcccaggcggatgtgcgcgtctttgaggagctccgcggactcagcgtggacatgagcctggccgtggagcagggcgcccccgtggtggtcagcgccgcggtgcagacgggcgacaacatcacgtggaccttcgacatgggggacggcaccgtgctgtcgggcccggaggcaacagtggagcatgtgtacctgcgggcacagaactgcacagtgaccgtgggtgcggccagccccgccggccacctggcccggagcctgcacgtgctggtcttcgtcctggaggtgctgcgcgttgaacccgccgcctgcatccccacgcagcctgacgcgcggctcacggcctacgtcaccgggaacccggcccactacctcttcgactggaccttcggggatggctcctccaacacgaccgtgcgggggtgcccgacggtgacacacaacttcacgcggagcggcacgttccccctggcgctggtgctgtccagccgcgtgaacagggcgcattacttcaccagcatctgcgtggagccagaggtgggcaacgtcaccctgcagccagagaggcagtttgtgcagctcggggacgaggcctggctggtggcatgtgcctggcccccgttcccctaccgctacacctgggactttggcaccgaggaagccgcccccacccgtgccaggggccctgaggtgacgttcatctaccgagacccaggctcctatcttgtgacagtcaccgcgtccaacaacatctctgctgccaatgactcagccctggtggaggtgcaggagcccgtgctggtcaccagcatcaaggtcaatggctcccttgggctggagctgcagcagccgtacctgttctctgctgtgggccgtgggcgccccgccagctacctgtgggatctgggggacggtgggtggctcgagggtccggaggtcacccacgcttacaacagcacaggtgacttcaccgttagggtggccggctggaatgaggtgagccgcagcgaggcctggctcaatgtgacggtgaagcggcgcgtgcgggggctcgtcgtcaatgcaagccgcacggtggtgcccctgaatgggagcgtgagcttcagcacgtcgctggaggccggcagtgatgtgcgctattcctgggtgctctgtgaccgctgcacgcccatccctgggggtcctaccatctcttacaccttccgctccgtgggcaccttcaatatcatcgtcacggctgagaacgaggtgggctccgcccaggacagcatcttcgtctatgtcctgcagctcatagaggggctgcaggtggtgggcggtggccgctacttccccaccaaccacacggtacagctgcaggccgtggttagggatggcaccaacgtctcctacagctggactgcctggagggacaggggcccggccctggccggcagcggcaaaggcttctcgctcaccgtgctcgaggccggcacctaccatgtgcagctgcgggccaccaacatgctgggcagcgcctgggccgactgcaccatggacttcgtggagcctgtggggtggctgatggtgaccgcctccccgaacccagctgccgtcaacacaagcgtcaccctcagtgccgagctggctggtggcagtggtgtcgtatacacttggtccttggaggaggggctgagctgggagacctccgagccatttaccacccatagcttccccacacccggcctgcacttggtcaccatgacggcagggaacccgctgggctcagccaacgccaccgtggaagtggatgtgcaggtgcctgtgagtggcctcagcatcagggccagcgagcccggaggcagcttcgtggcggccgggtcctctgtgcccttttgggggcagctggccacgggcaccaatgtgagctggtgctgggctgtgcccggcggcagcagcaagcgtggccctcatgtcaccatggtcttcccggatgctggcaccttctccatccggctcaatgcctccaacgcagtcagctgggtctcagccacgtacaacctcacggcggaggagcccatcgtgggcctggtgctgtgggccagcagcaaggtggtggcgcccgggcagctggtccattttcagatcctgctggctgccggctcagctgtcaccttccgcctgcaggtcggcggggccaaccccgaggtgctccccgggccccgtttctcccacagcttcccccgcgtcggagaccacgtggtgagcgtgcggggcaaaaaccacgtgagctgggcccaggcgcaggtgcgcatcgtggtgctggaggccgtgagtgggctgcagatgcccaactgctgcgagcctggcatcgccacgggcactgagaggaacttcacagcccgcgtgcagcgcggctctcgggtcgcctacgcctggtacttctcgctgcagaaggtccagggcgactcgctggtcatcctgtcgggccgcgacgtcacctacacgcccgtggccgcggggctgttggagatccaggtgcgcgccttcaacgccctgggcagtgagaaccgcacgctggtgctggaggttcaggacgccgtccagtatgtggccctgcagagcggcccctgcttcaccaaccgctcggcgcagtttgaggccgccaccagccccagcccccggcgtgtggcctaccactgggactttggggatgggtcgccagggcaggacacagatgagcccagggccgagcactcctacctgaggcctggggactaccgcgtgcaggtgaacgcctccaacctggtgagcttcttcgtggcgcaggccacggtgaccgtccaggtgctggcctgccgggagccggaggtggacgtggtcctgcccctgcaggtgctgatgcggcgatcacagcgcaactacttggaggcccacgttgacctgcgcgactgcgtcacctaccagactgagtaccgctgggaggtgtatcgcaccgccagctgccagcggccggggcgcccagcgcgtgtggccctgcccggcgtggacgtgagccggcctcggctggtgctgccgcggctggcgctgcctgtggggcactactgctttgtgtttgtcgtgtcatttggggacacgccactgacacagagcatccaggccaatgtgacggtggcccccgagcgcctggtgcccatcattgagggtggctcataccgcgtgtggtcagacacacgggacctggtgctggatgggagcgagtcctacgaccccaacctggaggacggcgaccagacgccgctcagtttccactgggcctgtgtggcttcgacacagagggaggctggcgggtgtgcgctgaactttgggccccgcgggagcagcacggtcaccattccacgggagcggctggcggctggcgtggagtacaccttcagcctgaccgtgtggaaggccggccgcaaggaggaggccaccaaccagacggtgctgatccggagtggccgggtgcccattgtgtccttggagtgtgtgtcctgcaaggcacaggccgtgtacgaagtgagccgcagctcctacgtgtacttggagggccgctgcctcaattgcagcagcggctccaagcgagggcggtgggctgcacgtacgttcagcaacaagacgctggtgctggatgagaccaccacatccacgggcagtgcaggcatgcgactggtgctgcggcggggcgtgctgcgggacggcgagggatacaccttcacgctcacggtgctgggccgctctggcgaggaggagggctgcgcctccatccgcctgtcccccaaccgcccgccgctggggggctcttgccgcctcttcccactgggcgctgtgcacgccctcaccaccaaggtgcacttcgaatgcacgggctggcatgacgcggaggatgctggcgccccgctggtgtacgccctgctgctgcggcgctgtcgccagggccactgcgaggagttctgtgtctacaagggcagcctctccagctacggagccgtgctgcccccgggtttcaggccacacttcgaggtgggcctggccgtggtggtgcaggaccagctgggagccgctgtggtcgccctcaacaggtctttggccatcaccctcccagagcccaacggcagcgcaacggggctcacagtctggctgcacgggctcaccgctagtgtgctcccagggctgctgcggcaggccgatccccagcacgtcatcgagtactcgttggccctggtcaccgtgctgaacgagtacgagcgggccctggacgtggcggcagagcccaagcacgagcggcagcaccgagcccagatacgcaagaacatcacggagactctggtgtccctgagggtccacactgtggatgacatccagcagatcgctgctgcgctggcccagtgcatggggcccagcagggagctcgtatgccgctcgtgcctgaagcagacgctgcacaagctggaggccatgatgctcatcctgcaggcagagaccaccgcgggcaccgtgacgcccaccgccatcggagacagcatcctcaacatcacaggagacctcatccacctggccagctcggacgtgcgggcaccacagccctcagagctgggagccgagtcaccatctcggatggtggcgtcccaggcctacaacctgacctctgccctcatgcgcatcctcatgcgctcccgcgtgctcaacgaggagcccctgacgctggcgggcgaggagatcgtggcccagggcaagcgctcggacccgcggagcctgctgtgctatggcggcgccccagggcctggctgccacttctccatccccgaggctttcagcggggccctggccaacctcagtgacgtggtgcagctcatctttctggtggactccaatccctttccctttggctatatcagcaactacaccgtctccaccaaggtggcctcgatggcattccagacacaggccggcgcccagatccccatcgagcggctggcctcagagcgcgccatcaccgtgaaggtgcccaacaactcggactgggctgcccggggccaccgcagctccgccaactccgccaactccgttgtggtccagccccaggcctccgtcggtgctgtggtcaccctggacagcagcaaccctgcggccgggctgcatctgcagctcaactatacgctgctggacggccactacctgtctgaggaacctgagccctacctggcagtctacctacactcggagccccggcccaatgagcacaactgctcggctagcaggaggatccgcccagagtcactccagggtgctgaccaccggccctacaccttcttcatttccccggggagcagagacccagcggggagttaccatctgaacctctccagccacttccgctggtcggcgctgcaggtgtccgtgggcctgtacacgtccctgtgccagtacttcagcgaggaggacatggtgtggcggacagaggggctgctgcccctggaggagacctcgccccgccaggccgtctgcctcacccgccacctcaccgccttcggcgccagcctcttcgtgcccccaagccatgtccgctttgtgtttcctgagccgacagcggatgtaaactacatcgtcatgctgacatgtgctgtgtgcctggtgacctacatggtcatggccgccatcctgcacaagctggaccagttggatgccagccggggccgcgccatccctttctgtgggcagcggggccgcttcaagtacgagatcctcgtcaagacaggctggggccggggctcaggtaccacggcccacgtgggcatcatgctgtatggggtggacagccggagcggccaccggcacctggacggcgacagagccttccaccgcaacagcctggacatcttccggatcgccaccccgcacagcctgggtagcgtgtggaagatccgagtgtggcacgacaacaaagggctcagccctgcctggttcctgcagcacgtcatcgtcagggacctgcagacggcacgcagcgccttcttcctggtcaatgactggctttcggtggagacggaggccaacgggggcctggtggagaaggaggtgctggccgcgagcgacgcagcccttttgcgcttccggcgcctgctggtggctgagctgcagcgtggcttctttgacaagcacatctggctctccatatgggaccggccgcctcgtagccgtttcactcgcatccagagggccacctgctgcgttctcctcatctgcctcttcctgggcgccaacgccgtgtggtacggggctgttggcgactctgcctacagcacggggcatgtgtccaggctgagcccgctgagcgtcgacacagtcgctgttggcctggtgtccagcgtggttgtctatcccgtctacctggccatcctttttctcttccggatgtcccggagcaaggtggctgggagcccgagccccacacctgccgggcagcaggtgctggacatcgacagctgcctggactcgtccgtgctggacagctccttcctcacgttctcaggcctccacgctgaggcctttgttggacagatgaagagtgacttgtttctggatgattctaagagtctggtgtgctggccctccggcgagggaacgctcagttggccggacctgctcagtgacccgtccattgtgggtagcaatctgcggcagctggcacggggccaggcgggccatgggctgggcccagaggaggacggcttctccctggccagcccctactcgcctgccaaatccttctcagcatcagatgaagacctgatccagcaggtccttgccgagggggtcagcagcccagcccctacccaagacacccacatggaaacggacctgctcagcagcctgtccagcactcctggggagaagacagagacgctggcgctgcagaggctgggggagctggggccacccagcccaggcctgaactgggaacagccccaggcagcgaggctgtccaggacaggactggtggagggtctgcggaagcgcctgctgccggcctggtgtgcctccctggcccacgggctcagcctgctcctggtggctgtggctgtggctgtctcagggtgggtgggtgcgagcttccccccgggcgtgagtgttgcgtggctcctgtccagcagcgccagcttcctggcctcattcctcggctgggagccactgaaggtcttgctggaagccctgtacttctcactggtggccaagcggctgcacccggatgaagatgacaccctggtagagagcccggctgtgacgcctgtgagcgcacgtgtgccccgcgtacggccaccccacggctttgcactcttcctggccaaggaagaagcccgcaaggtcaagaggctacatggcatgctgcggagcctcctggtgtacatgctttttctgctggtgaccctgctggccagctatggggatgcctcatgccatgggcacgcctaccgtctgcaaagcgccatcaagcaggagctgcacagccgggccttcctggccatcacgcggtctgaggagctctggccatggatggcccacgtgctgctgccctacgtccacgggaaccagtccagcccagagctggggcccccacggctgcggcaggtgcggctgcaggaagcactctacccagaccctcccggccccagggtccacacgtgctcggccgcaggaggcttcagcaccagcgattacgacgttggctgggagagtcctcacaatggctcggggacgtgggcctattcagcgccggatctgctgggggcatggtcctggggctcctgtgccgtgtatgacagcgggggctacgtgcaggagctgggcctgagcctggaggagagccgcgaccggctgcgcttcctgcagctgcacaactggctggacaacaggagccgcgctgtgttcctggagctcacgcgctacagcccggccgtggggctgcacgccgccgtcacgctgcgcctcgagttcccggcggccggccgcgccctggccgccctcagcgtccgcccctttgcgctgcgccgcctcagcgcgggcctctcgctgcctctgctcacctcggtgtgcctgctgctgttcgccgtgcacttcgccgtggccgaggcccgtacttggcacagggaagggcgctggcgcgtgctgcggctcggagcctgggcgcggtggctgctggtggcgctgacggcggccacggcactggtacgcctcgcccagctgggtgccgctgaccgccagtggacccgtttcgtgcgcggccgcccgcgccgcttcactagcttcgaccaggtggcgcagctgagctccgcagcccgtggcctggcggcctcgctgctcttcctgcttttggtcaaggctgcccagcagctacgcttcgtgcgccagtggtccgtctttggcaagacattatgccgagctctgccagagctcctgggggtcaccttgggcctggtggtgctcggggtagcctacgcccagctggccatcctgctcgtgtcttcctgtgtggactccctctggagcgtggcccaggccctgttggtgctgtgccctgggactgggctctctaccctgtgtcctgccgagtcctggcacctgtcacccctgctgtgtgtggggctctgggcactgcggctgtggggcgccctacggctgggggctgttattctccgctggcgctaccacgccttgcgtggagagctgtaccggccggcctgggagccccaggactacgagatggtggagttgttcctgcgcaggctgcgcctctggatgggcctcagcaaggtcaaggagttccgccacaaagtccgctttgaagggatggagccgctgccctctcgctcctccaggggctccaaggtatccccggatgtgcccccacccagcgctggctccgatgcctcgcacccctccacctcctccagccagctggatgggctgagcgtgagcctgggccggctggggacaaggtgtgagcctgagccctcccgcctccaagccgtgttcgaggccctgctcacccagtttgaccgactcaaccaggccacagaggacgtctaccagctggagcagcagctgcacagcctgcaaggccgcaggagcagccgggcgcccgccggatcttcccgtggcccatccccgggcctgcggccagcactgcccagccgccttgcccgggccagtcggggtgtggacctggccactggccccagcaggacaccccttcgggccaagaacaaggtccaccccagcagcacttagtcctccttcctggcgggggtgggccgtggagtcggagtggacaccgctcagtattactttctgccgctgtcaaggccgagggccaggcagaatggctgcacgtaggttccccagagagcaggcaggggcatctgtctgtctgtgggcttcagcactttaaagaggctgtgtggccaaccaggacccagggtcccctccccagctcccttgggaaggacacagcagtattggacggtttctagcctctgagatgctaatttatttccccgagtcctcaggtacagcgggctgtgcccggccccaccccctgggcagatgtcccccactgctaaggctgctggcttcagggagggttagcctgcaccgccgccaccctgcccctaagttattacctctccagttcctaccgtactccctgcaccgtctcactgtgtgtctcgtgtcagtaatttatatggtgttaaaatgtgtatatttttgtatgtcactattttcactagggctgaggggcctgcgcccagagctggcctcccccaacacctgctgcgcttggtaggtgtggtggcgttatggcagcccggctgctgcttggatgcgagcttggccttgggccggtgctgggggcacagctgtctgccaggcactctcatcaccccagaggccttgtcatcctcccttgccccaggccaggtagcaagagagcagcgcccaggcctgctggcatcaggtctgggcaagtagcaggactaggcatgtcagaggaccccagggtggttagaggaaaagactcctcctgggggctggctcccagggtggaggaaggtgactgtgtgtgtgtgtgtgtgcgcgcgcgacgcgcgagtgtgctgtatggcccaggcagcctcaaggccctcggagctggctgtgcctgcttctgtgtaccacttctgtgggcatggccgcttctagagcctcgacacccccccaacccccgcaccaagcagacaaagtcaataaaagagctgtctgactgc

SEQ ID NO: 5548 - DNA, 3880 bp, Homo sapiens
gctcgagtgccaaagctggggttctacttgagatttccctcgtggtgccagggtccggcgagcatcacgccgaggcccattttccagacgaccacgacgaggccggggtcacgaactctggcgccccttaccagcttccagtctctcgaggtggccagtgtggtgcttggtccttgtttccaggatggacttccccagctccctccgccctgcgttgtttctgaccggcccccttggtctgagcgacgtccctgacctctctttcatgtgcagctggcgagacgcactgactctgccagaggcccagccccagaactcagagaatggggcactgcatgtgaccaaggacctgctgtgggagccggcaacccctgggcctctccccatgctgcctcccctcatcgatccctgggaccctggcctgactgcccgggacctgcttttccgcggagggtaccggtatcggaagcggccccgagtcgtgctggatgtgactgagcagatcagccggttcctcttggatcatggagacgtagcctttgcgcccctggggaagctgatgctggagaatttcaagctggagggagcggggagccgcactaagaagaagacagtggtcagtgtgaagaagctgctccaggacctcggtggacaccagccctgggggtgtccctgggcttacctcagcaaccgacagcgccgcttctctatcctcgggggccccatcctgggcacgtcggtggcgagccacttggcagagctgctgcacgaggagctggtgctgcggtgggagcagctgcttctggatgaggcctgcactgggggcgcgctggcctgggttcctggaaggacaccccagttcgggcagctggtctaccctgctggaggcgcccaggacaggctgcatttccaagaggtcgttctgaccccaggtgacaatccccaattccttgggaaacctggacgcatccagctccagggacctgtccggcaagtggtgacatgcaccgtccagggagaaagtaaggcccttatatacactttcctccctcactggctgacctgctacctgacccctggccctttccatccctcctcagctctgctggccgtccgctctgactaccactgtgccgtgtggaagtttggtaaacagtggcagccaacccttctgcaggcgatgcaggtggagaaaggggccacggggatcagcctcagccctcacctgcccggggagctggccatctgcagccgctcgggagccgtctgcctgtggagccctgaggatgggctgcggcaaatctacagggaccctgagaccctcgtgttccgggactcctcttcgtggcgttgggcagacttcactgcgcaccctcgggtgctgaccgtgggtgaccgcaccggagtgaagatgctggacactcagggcccgccgggctgtggtctgttgctttttcgtttgggggcagaggcttcgtgccagaaaggggaacgtgtcctgcttacccagtacctggggcactccagccccaaatgcctcccccctactcttcatctcgtctgtacccagttctctctctacctagtggacgagcgccttcccctggtgccgatgctgaagtggaaccatggcctcccctccccgctcctgctggcccgactgctgcctccgccccggcccagctgcgtgcagcccctgctcctcggaggccagggtgggcagctgcagctgctgcacctggcaggagaaggggcgtcggtgccccgcctggcaggccccccccagtctcttccttccaggatcgactccctccctgcatttcctctgctggagcctaagatccagtggcggctgcaggagcgcctgaaagcaccgaccataggtctggctgccgtcgtcccgcccttgccctcagcgcccacaccaggcctggtgctcttccagctctcggcggcgggagatgtcttctaccagcagctccgcccccaggtggactccagcctccgcagagatgctgggcctcctggcgacacccaacctgactgccatgcccccacagcttcctggacctcccaggacactgccggctgcagccagtggctgaaggccctgctaaaagtgcccctggctcctcctgtgtggacagcacccaccttcacccaccgccagatgctgggcagcacagagctgcggagggaggaagaggaagggcagcggctgggtgtgctccgcaaggccatggcccgagggcagctcctgctgcagagagacctgggctccctccctgcggcagagccaccccctgcacccgagtcaggcctagaggacaagctcagtgagcgcctgggggaagcctgggcaggccgaggggctgcctggtgggagaggcagcagggcaggacctcggagcccgggagacagaccaggcggcccaagcgccggacccagctgtccagcagcttttcgctcagtggccatgtggatccgtcagaggacaccagctcccctcatagccctgagtggccacctgctgatgctctgcccctgccccccacgaccccgccctcccaggagttgactccggatgcatgcgcccagggcgtcccatcagagcagcggcagatgctccgtgactacatggccaagctaccaccccagagggacaccccaggctgtgccaccacacctccccactcccaggcctccagcgtccgggccactcgctcccagcagcacacacccgtcctctctagctctcagcccctccggaagaagcctcgaatgggcttctgaggacacaaggtgggctgccctcaagccccagagagcccctcatccttcctctgggaccagatgtgccttccacagttgaaacttgagaagcagagctcgccaccttctggaggccactgtgatgatgagccaagcaatttggagccaagttgaagggacagggcaacaaaatacagtagtagtttcttttgtattttgtatattcgcctgaagatcatcccgcaaggcaggctggaggtgccggtgggcctgtgttgctgggattttagtctgtgctgggaggcagggctccgtgcgcctcagctgtgggggcctcaggcaggtccctcagttctcacgccttcctgtccagtggaatgggggccaggagtgctggctcctcgtgtttggtgagggtggagtgaggcccctgcagagctgctgatgaggtgggcacagcggccgttggcagctgctgttgtgggttgctttgtcaatctctgccccggtctgatgtttcctacagggagatgccgtggatccaggttcagggactaaatacacttggcagctgaagatgaattggaatggtcacgttttttaggctggacagcgtcccgccacagctactacctgacactgagctcatgcagagagatgatggctgatgttccttctcccttgggacatgggtctggcacctgtgggctgtcgatagtgccctctgagcagagggtcacggtcatgtcagtttgggggaattctctgttgtgcctcagagactcccccctttctttcctccctccccttctcattttgatgtctaaagcatcaagtccctcttcctcagagtttctctagctgcagtggaagattctgttttcctgtggggaaaatgctcacttgagattttgcagggacccgggtctgtctggtttctgatgacatagtaagagaaaggtcttttttcaggttggctggtgaaaggaattgcatgtgactcacacaaacaggagctagcccaatcatacactgactcgcgtgggtgtttaaatgtttatcatgcctaagggagacatttataattaaaccatttatgctacataa

SEQ ID NO: 5549 - DNA, 2146 bp, Homo sapiens
tactcccggagtcactcatcccttaagcaagcagggtggggttaggtgcgcgtgcgcggttttaatactcctccccgaactgccaactcttcacgcacgcgaagtaggccccaccctggctgggtttacgcgtgcgcactaacgggcctggtcccggaagaccacacgcgtgcgtggtggggactacggtgacagtaccccgggtggggcgagggccagtcatggcggagtcctggtctgggcaggccttgcaggctctgccggccacggtgctgggcgcgctgggcagcgagttcttgcgggagtgggaggcgcaggacatgcgcgtgaccctcttcaagctgctgctgctgtggttggtgttaagtctcctgggcatccagctggcgtgggggttctacgggaatacagtgaccgggttgtatcaccgtccaggtctgggtggtcagaatggatccacgcctgatggctccacgcatttcccttcgtgggaaatggcagcaaacgaacctctcaaaacccacagagaataagggaaggcagcagagggtctccaagggcatcactgggtctgctggcttctacactgggttctgctactccccagacctcagggacaactgccgggggttcagggttggtagcagggagtacccagtgcctacagggctgggcctcttctgcctcttaagcctgctccctcacccaggcactgggcaagtgaagagtttgcctgtactcttatctgggtgccttaaggagagagattgtgttcttcctctctcaggggtgataactcaggaagcctctgggttgggaagaccatcagttcttttgtcttaggtttcttttcctgtccctcttccatccccaagatgtgaccccataaaaatttttcctgagttggccaggcatggtggctcacgcctgtaatcccaacactttgggaggctgaggcaggcagatcacgaggtcaggagttcgagaccagcctgaccaacatggtgaaaaccccatctctactaaaaatacaaaaattagccgggtgtggtggcacacaccagtaatcccagctactcgggaggctgaagcaggagatttgcttgaacctgggaggcagaggttgcagtgagccaagattgcgccgttgtactccagcctgggcaacagagcaagacccatctcaaaaaaaaaatttttttcctgagaggaagcctgaggttgaccagctctggggtttgtaaggcaggtctgttttctcctaggccctgagttttctgaatctctggttttgctttgttggcaaggagccagggaatcctgacctgagccagaccttaagctctatggttatttagctggccattcaggtataaggcagggtggtgtacctgctggcactatccagatggaggcaccaaacacccacatacctggcccaaccagacttctcccgtgagccaggcaaaggaaattgtcatctgccaactgtcctactcatattcctctcagtccttcttgggggtaagctgattacctgaaggacagctgaacccctggggtagcctcctatccaccactgcttaagtgcctatgggaatgtgggtctgcaccttgtcccctcataggatggtaccaagcatttagtgcacagtggccccatcatagcctgcagcctcatcatttcccatctggacctggtacaaatgcacgtcacaggctcagctcctccccactagcatcttctctaccttcaagaaccaggcagccctgccatgtcacaataggccaggggagtttccaaagatgtgggtggcaaatgcccctatagaaacaccagtacctgaaagcactgtagccctggacctgcctccttccctcggggccatacttctgtttccatctgctgggccaccagccactttagtgacccctgcctacttccttcctgttggatatcatacttccatctggctgcctttgcttaagccatctttgtggtagaggggccctggaattgcagctgtactgaggatgatgttattcacagcccctggcccacccactaatactactgcacagagtcaggatctcacatttcaccccaggctcaactgaggatgtggcttattaaacacggaagtgc

SEQ ID NO: 5550 - DNA, 423 bp, Homo sapiens
ccggaagtgactgcggacgaatcggcgtttgccgaggctggcatagatttggctgtctccgctcatagctgcttttggcgcgaaagatgccgggtctggttgactcaaaccctgccccgcctgagtctcaggagaagaagccgctgaagccctgctgcgcttgcccggagaccaagaaggcgcgcgatgcgtgtatcatcgagaaaggagaagaacactgtggacatctaattgaggcccacaaggaatgcatgagagccctaggatttaaaatatgaaatggtggtctgctgtgtgaataaataattcctgaagaatgaagaagattaattttgggagttctttgacgaactttgatatgtggaaaaagtatttataatttattgtaagaagaaagtaaaatattactagtggaagatcttc

SEQ ID NO: 5551 - DNA, 2267 bp, Homo sapiens
ggtagtagcaaatattcaaatgagaacagcttgaagaccgttcatttttaagtgacaagagactcacctccaagaagcaattgtgttttcagaatgattttattcaagcaagcaacttatttcatttccttgtttgctacagtttcctgtggatgtctgactcaactctatgaaaacgccttcttcagaggtggggatgtagcttccatgtacaccccaaatgcccaatactgccagatgaggtgcacattccacccaaggtgtttgctattcagttttcttccagcaagttcaatcaatgacatggagaaaaggtttggttgcttcttgaaagatagtgttacaggaaccctgccaaaagtacatcgaacaggtgcagtttctggacattccttgaagcaatgtggtcatcaaataagtgcttgccatcgagacatttataaaggagttgatatgagaggagtcaattttaatgtgtctaaggttagcagtgttgaagaatgccaaaaaaggtgcaccaataacattcgctgccagtttttttcatatgccacgcaaacatttcacaaggcagagtaccggaacaattgcctattaaagtacagtcccggaggaacacctaccgctataaaggtgctgagtaacgtggaatctggattctcactgaagccctgtgccctttcagaaattggttgccacatgaacatcttccagcatcttgcgttctcagatgtggatgttgccagggttctcactccagatgcttttgtgtgtcggaccatctgcacctatcaccccaactgcctcttctttacattctatacaaatgtatggaaaatcgagtcacaaagaaatgtttgtcttcttaaaacatctgaaagtggcacaccaagttcctctactcctcaagaaaacaccatatctggatatagccttttaacctgcaaaagaactttacctgaaccctgccattctaaaatttacccgggagttgactttggaggagaagaattgaatgtgacttttgttaaaggagtgaatgtttgccaagagacttgcacaaagatgattcgctgtcagtttttcacttattctttactcccagaagactgtaaggaagagaagtgtaagtgtttcttaagattatctatggatggttctccaactaggattgcgtatgggacacaagggagctctggttactctttgagattgtgtaacactggggacaactctgtctgcacaacaaaaacaagcacacgcattgttggaggaacaaactcttcttggggagagtggccctggcaggtgagcctgcaggtgaagctgacagctcagaggcacctgtgtggagggtcactcataggacaccagtgggtcctcactgctgcccactgctttgatgggcttcccctgcaggatgtttggcgcatctatagtggcattttaaatctgtcagacattacaaaagatacacctttctcacaaataaaagagattattattcaccaaaactataaagtctcagaagggaatcatgatatcgccttgataaaactccaggctcctttgaattacactgaattccaaaaaccaatatgcctaccttccaaaggtgacacaagcacaatttataccaactgttgggtaaccggatggggcttctcgaaggagaaaggtgaaatccaaaatattctacaaaaggtaaatattcctttggtaacaaatgaagaatgccagaaaagatatcaagattataaaataacccaacggatggtctgtgctggctataaagaagggggaaaagatgcttgtaagggagattcaggtggtcccttagtttgcaaacacaacggaatgtggcgtttggtgggcatcacaagctggggtgaaggctgtgcccgcagggagcaacctggtgtctacaccaaagtcgctgagtacatggactggattttagagaaaacacagagcagtgatggaaaagctcagatgcagtcaccagcatgagaagcagtccagagtctaggcaatttttacaacctgagttcaagtcaaattctgagcctggggggtcctcatctgcaaagcatggagagtggcatcttctttgcatcctaaggacgaaagacacagtgcactcagagctgctgaggacaatgtctgctgaagcccgctttcagcacgccgtaaccaggggctgacaatgcgaggtcgcaactgagatctccatgactgtgtgttgtgaaataaaatggtgaaagatc

SEQ ID NO: 5552 - DNA, 2595 bp, Homo sapiens
  misc_feature (1)..(2595): n=a,t,g or c
tctagaccaccagcctggacaacataccaagaccctgtctctacaaataaatagataaataaatagacactttttttaagtgtcaaaagtgcttggcacttagtagaccatcagtgttaggtgctcatacataccccgattattgccttgtcccagtgtcttgtacaggggttggagagnaggtgttaagaaatgaccgaatgggtaaatggatgaacagaacacctccctccagagcccacatgctcgtgggcctctgggaccactctcctcctcctcttgcttccctgagctcccccagcatggcctctgtccaggccttgcgctgcctccaggcctttgctgtggctactgcccctggagcgccatntccacagctcctcctgtggctggctcctcatcacccagatgacctggtgggtgaggccacctagcaaggagtcatgcctgtcctgccttctgactcactctctcatcaccctgccttttttttcttttgtggctcacgtgtttgcatgtctccccccatgaggcagggggccatgtgtgtcttattcacttctgtagccacagcaccctgagcaatgcttgccacatagtaggtgctcaattaatgttgaatgaatgggcaaaatgcgggatggcgggacagagttctctcaaggcattctgccagagaatgtccctctgtcaccttgaatccagtgtacctccagatgactcccccattccctcctgtagttcatgcttttctctccccttcctccccagacacggcctacccacccctggcaaccaacatggccaacttcacacctgtcaatggcagctcgggcaatcagtccgtgcgcctggtcacgtcatcatcccacaatcgctatgagacggtggaaatggtcttcattgccacagtgacaggctccctgagcctggtgactgtcgtgggcaacatcctggtgatgctgtccatcaaggtcaacaggcagctgcagacagtcaacaactacttcctcttcagcctggcgtgtgctgatctcatcataggcgccttctccatgaacctctacaccgtgtacatcatcaagggctactggcccctgggcgccgtggtctgcgacctgtggctggccctggactacgtggtgagcaacgcctccgtcatgaaccttctcatcatcagctttgaccgctacttctgcgtcaccaagcctctcacctaccctgcccggcgcaccaccaagatggcaggcctcatgattgctgctgcctgggtactgtccttcgtgctctgggcgcctgccatcttgttctggcagtttgtggtgggtaagcggacggtgcccgacaaccactgcttcatccagttcctgtccaacccagcagtgacctttggcacagccattgctgccttctacctgcctgtggtcatcatgacggtgctgtacatccacatctccctggccagtcgcagccgagtccacaagcaccggcccgagggcccgaaggagaagaaagccaagacgctggccttcctcaagagcccactaatgaagcagagcgtcaagaagccccgcccgggaggccgcccgggaggactgcgcaatggcaagctggaggaggcccccccgccagcgctgccaccgccaccgcgccccgtggctgataaggacacttccaatgagtccagctcaggcagtgccacccagaacaccaaggaacgcccagccacagagctgtccaccacagaggccaccactcccgccatgcccgcccctcccctgcagccgcgggccctcaacccagcctccagatggtccaagatccagattgtgacgaagcagacaggcaatgagtgtgtgacagccattgagattgtgcctgccacgccggctggcatgcgccctgcggccaacgtggcccgcaagttcgccagcatcgctcgcaaccaggtgcgcaagaagcggcagatggcggcccgggagcgcaaagtgacacgaacgatctttgccattctgctagccttcatcctcacctggacgccctacaacgtcatggtcctggtgaacaccttctgccagagctgcatccctgacacggtgtggtccattggctactggctctgctacgtcaacagcaccatcaaccctgcctgctatgctctgtgcaacgccacctttaaaaagaccttccggcacctgctgctgtgccagtatcggaacatcggcactgccaggtaggcaggcaggagtgccctaggaggtgcggtgtgcgtgcgtgtgctgggggaccacacggctcacttgctgtggggaagagtgcaggcaccattctgcgttcacgtttgctgaggaggaagttcagaagaggctctgtggctgcattcagagaccagatctctgctcacccgtgaggaggctcaccccagggagtgtctgaactggggctgcctggcccacctctgtggccctgcttcagcgagctgcggggcactggcctgggtgggcacctgcccactgtgaccaaccatcagcagtgctggaagaatggagatctggatgggggccgaagcccagggccccctcaggaagaacaaag

SEQ ID NO: 5553 - DNA, 1923 bp, Homo sapiens
gctgagcatcgccagggcgggcggcagggcgcggcctctccgccgggtgtacctcctgtcgcggcgcgagacctctggtgaaagaaaagatgttgtcccggttaagagtagtttccaccacttgtactttggcatgtcgacatttgcacataaaagaaaaaggcaagccacttatgctgaacccaagaacaaacaagggaatggcatttactttacaagaacgacaaatgcttggtcttcaaggacttctacctcccaaaatagagacacaagatattcaagccttacgatttcatagaaacttgaagaaaatgactagccctttggaaaaatatatctacataatgggaatacaagaaagaaatgagaaattgttttatagaatactgcaagatgacattgagagtttaatgccaattgtatatacaccgacggttggtcttgcctgctcccagtatggacacatctttagaagacctaagggattatttatttcgatctcagacagaggtcatgttagatcaattgtggataactggccagaaaatcatgttaaggctgttgtagtgactgatggagagagaattctgggtcttggagatctgggtgtctatggaatgggaattccagtaggaaaactttgtttgtatacagcttgtgcaggaatacggcctgatagatgcctgccagtgtgtattgatgtgggaactgataatatcgcactcttaaaagacccattttacatgggcttgtaccagaaacgagatcgcacacaacagtatgatgacctgattgatgagtttatgaaagctattactgacagatatggccggaacacactcattcagttcgaagactttggaaatcataatgcattcaggttcttgagaaagtaccgagaaaaatattgtactttcaatgatgatattcaagggacagctgcagtagctctagcaggtcttcttgcagcacaaaaagttattagtaaaccaatctccgaacacaaaatcttattccttggagcaggagaggctgctcttggaattgcaaatcttatagttatgtctatggtagaaaatggcctgtcagaacaagaggcacaaaagaaaatctggatgtttgacaagtatggtttattagttaagggacggaaagcaaaaatagatagttatcaggaaccatttactcactcagccccagagagcatacctgatacttttgaagatgcagtgaatatactgaagccttcaactattattggagttgcaggtgctggccgtcttttcactcctgatgtaatcagagccatggcctctatcaatgaaaggcctgtaatatttgcattaagtaatcctacagcacaggcagagtgcacggctgaagaagcatatacacttacagagggcaggtgtttgtttgccagtggcagtccatttgggccagtgaaacttacagatgggcgagtctttacaccaggtcaaggaaacaatgtttatatttttccaggtgtggctttagctgttattctctgtaacacccggcatattagtgacagtgttttcctagaagctgcaaaggccctgacaagccaattgacagatgaagagctagcccaagggagactttacccaccgcttgctaatattcaggaagtttctattaacattgctattaaagttacagaatacctatatgctaataaaatggctttccgatacccagaacctgaagacaaggccaaatatgttaaagaaagaacatggcggagtgaatatgattccctgctgccagatgtgtatgaatggccagaatctgcatcaagccctcctgtgataacagaatagaagcactcccctgataaatactttctgtgctccagggaaccccttttttcagacaagaagagataatgtcttcagtttt

SEQ ID NO: 5554 - DNA, 1029 bp, Homo sapiens
tctgcttttaataagcttcccaatcagctctcgagtgcaaagcgctctccctccctcgcccagccttcgtcctcctggcccgctcctctcatccctcccattctccatttcccttccgttccctccctgtcagggcgtaattgagtcaaaggcaggatcaggttccccgccttccagtccaaaaatcccgccaagagagccccagagcagaggaaaatccaaagtggagagaggggaagaaagagaccagtgagtcatccgtccagaaggcggggagagcagcagcggcccaagcaggagctgcagcgagccgggtacctggactcagcggtagcaacctcgccccttgcaacaaaggcagactgagcgccagagaggacgtttccaactcaaaaatgcaggctcaacagtaccagcagcagcgtcgaaaatttgcagctgccttcttggcattcattttcatactggcagctgtggatactgctgaagcagggaagaaagagaaaccagaaaaaaaagtgaagaagtctgactgtggagaatggcagtggagtgtgtgtgtgcccaccagtggagactgtgggctgggcacacgggagggcactcggactggagctgagtgcaagcaaaccatgaagacccagagatgtaagatcccctgcaactggaagaagcaatttggcgcggagtgcaaataccagttccaggcctggggagaatgtgacctgaacacagccctgaagaccagaactggaagtctgaagcgagccctgcacaatgccgaatgccagaagactgtcaccatctccaagccctgtggcaaactgaccaagcccaaacctcaagcagaatctaagaagaagaaaaaggaaggcaagaaacaggagaagatgctggattaaaagatgtcacctgtggaacataaaaaggacatcagcaaacaggatcagttaactattgcatttatatgtaccgtaggctttgtattcaaaaattatctatagctaagtacacaataagcaaaaacaa

SEQ ID NO: 5555 - DNA, 2678 bp, Homo sapiens
cggccggccaatacataggaacacttgggtccctgcagtcagggtgtggaaatggcagatgagttcagccctaaggtgcatttttcttactaggaggagatggagtgtattttatgggatataagcattagctacatttcctgtcctgttcacatcctttgcccatgtgtctatgaggttattgatcttcttactgatttattgtagctctttacttaggaggttaattagccttttgcctgtggagagttttttggtttgccatttgtccttttttaattttttttgttttttggccatttgtcttttgactccgatgtggtttttgctgatttcctttgatgtattctagtttatctgacttttctttggcgacttatggactttctctcaccactaaaagccctcactgctctctcagtcttcttgatttaacctcctccaggcttccgccttctccaggccctgattctcagttggagttgctggtgcctcctccttcacccagcgtctgacgctggagtgctcacagtgtggctgggacccacttctctcctctgtagatacccacccctgtgttgatcacttgcaggcccgggttctgtgtgccatgtgtatgccctagagcccttgctcacgtttccccacagccttcatgaagtctgtgttcctcagatgccccacagacatcacaagcaaggcacatccaaaccccagaccactatccaggagcctgcaccctctttctgttggctccacctccagcctccgagacccacccacttccctgcatttgctgagaccatcattttccacctagacaatgcccccacgcttgccctacagcccttccaaaaacgattttttccaacttaaatcagactagaaagctttttcacatagcccagtcttcctccttgtgctgggttctgtctcattatcacctcatcagggaagtctgtacagatagaatccctacccctgcatttgtcgcctccgtctgcctctttggtcagtttcaggtccctgtagttcacactgtgtccccagggatgaagtgggtcccggcacggtgggcattctgtcatgaatgaatggtccccttgtgtatgcagggttcgcgctgcagctaggcagcatctccgcaggtccaggtagtgtaagccctcacctccacgtcccctgggacctcggcatggctggcctttctggccagatccaatcaccctcccgcgaaggtggctttgcgcatcgcgttctgctccccagcgatctgaggagtgaacaggaccccacggacgaggatccctgccggggtgtgggccctgctctgatcaccacccgctggcgctcccccaggggccggagccggggccgccccagcactgggggcggggtggttaggggcggccgttgcgatgtatgtggcaaggtgttcagccaacgcagcaacctgctgaggcaccagaagatccacacgggtgagcgaccattcgtgtgcagcgagtgcggccgcagcttcagccgcagctcgcacctgctgcgccaccagcttacgcacaccgaggagcggccgttcgtgtgcggcgactgtggccagggcttcgtgcgcagcgcgcgcctggaagagcatcggagagtgcacacgggcgaacagcctttccgttgcgctgagtgcggccagagcttccggcagcgctccaatctgctgcagcaccagcgcatccacggcgatcccccgggccctggcgctaagcccccggcccctcctggtgcgcccgagcctcccggcccctttccgtgcagcgagtgccgcgagagcttcgcgcggcgcgccgtgctgctggagcaccaggcggtacacacgggcgacaagtcctttggctgcgtcgagtgcggcgagcgcttcggccgccgctcagtgctgctgcagcaccggcgcgtgcacagtggcgagcggcccttcgcctgtgccgagtgcggccagagcttccggcagcgctccaacctgacgcagcaccggcgcatccacaccggggagcggcccttcgcctgcgccgagtgtggcaaggccttccgccagcggcctacgctcacgcagcatctccgcgtacacacgggcgagaaaccctttgcctgccccgagtgtggccagcgcttcagccagcgcctcaagctcacgcgtcatcagaggacacacaccggcgaaaagccctaccactgcggtgagtgcggcctgggcttcacgcaggtctcgcggctcaccgagcaccagcgcatccacacgggcgaacggcccttcgcctgccccgagtgcggccagagctttcggcagcacgccaacctcacccagcaccggcgcatccacacgggtgaacggccctacgcatgccctgagtgtggcaaggccttccgccagcggcccacgctcacgcagcatctgcgcacccaccgacgagagaagcccttcgcctgccaggactgtggccgccgcttccaccagagcaccaagctcattcagcaccagcgcgtccacagcgccgagtagctccagccgggacgcactgtgtccgccatggtcctcccctggttattgtgaggctggcgattacataagtataagcaggtcgcccagggcttggctactgtaggtgtccaataaacagtagatggaaacc

SEQ ID NO: 5556 - DNA, 2373 bp, Homo sapiens
gaattcgggcgggggcgccgcccggggccctgagggctggctagggtccaggccgggggggacgggacagacgaaccagccccgtgtaggaagcgcgacaatgccccgctacggagcgtcactccgccagagctgccccaggtccggccgggagcagggacaagacgggaccgccggagcccccggactcctttggatgggcctggtgctggcgctggcgctggcgctggcgctggctctgtctgactctcgggttctctgggctccggcagaggctcaccctctttctccccaaggccatcctgccaggttacatcgcatagtgccccggctccgagatgtctttgggtgggggaacctcacctgcccaatctgcaaaggtctattcaccgccatcaacctcgggctgaagaaggaacccaatgtggctcgcgtgggctccgtggccatcaagctgtgcaatctgctgaagatagcaccacctgccgtgtgccaatccattgtccacctctttgaggatgacatggtggaggtgtggagacgctcagtgctgagcccatctgaggcctgtggcctgctcctgggctccacctgtgggcactgggacattttctcatcttggaacatctctttgcctactgtgccgaagccgccccccaaaccccctagccccccagccccaggtgcccctgtcagccgcatcctcttcctcactgacctgcactgggatcatgactacctggagggcacggaccctgactgtgcagacccactgtgctgccgccggggttctggcctgccgcccgcatcccggccaggtgccggatactggggcgaatacagcaagtgtgacctgcccctgaggaccctggagagcctgttgagtgggctgggcccagccggcccttttgatatggtgtactggacaggagacatccccgcacatgatgtctggcaccagactcgtcaggaccaactgcgggccctgaccaccgtcacagcacttgtgaggaagttcctggggccagtgccagtgtaccctgctgtgggtaaccatgaaagcatacctgtcaatagcttccctccccccttcattgagggcaaccactcctcccgctggctctatgaagcgatggccaaggcttgggagccctggctgcctgccgaagccctgcgcaccctcagaattggggggttctatgctctttccccataccccggtctccgcctcatctctctcaatatgaatttttgttcccgtgagaacttctggctcttgatcaactccacggatcccgcaggacagctccagtggctggtgggggagcttcaggctgctgaggatcgaggagacaaagtgcatataattggccacattcccccagggcactgtctgaagagctggagctggaattattaccgaattgtagccaggtatgagaacaccctggctgctcagttctttggccacactcatgtggatgaatttgaggtcttctatgatgaagagactctgagccggccgctggctgtagccttcctggcacccagtgcaactacctacatcggccttaatcctggttaccgtgtgtaccaaatagatggaaactactccaggagctctcacgtggtcctggaccatgagacctacatcctgaatctgacccaggcaaacataccgggagccataccgcactggcagcttctctacagggctcgagaaacctatgggctgcccaacacactgcctaccgcctggcacaacctggtatatcgcatgcggggcgacatgcaacttttccagaccttctggtttctctaccataagggccacccaccctcggagccctgtggcacgccctgccgtctggctactctttgtgcccagctctctgcccgtgctgacagccctgctctgtgccgccacctgatgccagatgggagcctcccagaggcccagagcctgtggccaaggccactgttttgctagggccccagggcccacatttgggaaagttcttgatgtaggaaagggtgaaaaagcccaaatgctgctgtggttcaaccaggcaagatcatccggtgaaagaaccagtccctgggccccaaggatgccggggaaacaggaccttctcctttcctggagctggtttagctggatatgggagggggtttggctgcctgtgcccaggagctagactgccttgaggctgctgtcctttcacagccatggagtagaggcctaagttgacactgccctgggcagacaagacaggagctgtcgccccaggcctgtgctgcccagccaggaaccctgtactgctgctgcgacctgatgctgccagtctgttaaaataaagcccgcccgaattc

SEQ ID NO: 5557 - DNA, 2393 bp, Homo sapiens
cggcgcgggacccgggtggggaagctggagctgttgcggggtccgcggggaagtcttggcggtggagccatggtcggccagctgagcgagggggccattgcggccatcatgcagaagggggatacaaacataaagcccatcctccaagtcatcaacatccgtcccattactacggggaatagtccgccgcgttatcgactgctcatgagtgatggattgaacactctatcctctttcatgttggcgacacagttgaaccctctcgtggaggaagaacaattgtccagcaactgtgtatgccagattcacagatttattgtgaacactctgaaagacggaaggagagtagttatcttgatggaattagaagttttgaagtcagctgaagcagttggagtgaagattggcaatccagtgccctataatgaaggactcgggcagccgcaagtagctcctccagcgccagcagccagcccagcagcaagcagcaggccccagccgcagaatggaagctcgggaatgggttctactgtttctaaggcttatggtgcttcaaagacatttggaaaagctgcaggtcccagcctgtcacacacttctgggggaacacagtccaaagtggtgcccattgccagcctcactccttaccagtccaagtggaccatttgtgctcgtgttaccaacaaaagtcagatccgtacctggagcaactcccgaggggaagggaagcttttctccctagaactggttgacgaaagtggtgaaatccgagctacagctttcaatgagcaagtggacaagttctttcctcttattgaagtgaacaaggtgtattatttctcgaaaggcaccctgaagattgctaacaagcagttcacagctgttaaaaatgactacgagatgaccttcaataacgagacttccgtcatgccctgtgaggacgaccatcatttacctacggttcagtttgatttcacggggattgatgacctcgagaacaagtcgaaagactcacttgtagacatcatcgggatctgcaagagctatgaagacgccactaaaatcacagtgaggtctaacaacagagaagttgccaagaggaatatctacttgatggacacatccgggaaggtggtgactgctacactgtggggggaagatgctgataaatttgatggttctagacagcccgtgttggctatcaaaggagcccgagtctctgatttcggtggacggagcctctccgtgctgtcttcaagcactatcattgcgaatcctgacatcccagaggcctataagcttcgtggatggtttgacgcagaaggacaagccttagatggtgtttccatctctgatctaaagagcggcggagtcggagggagtaacaccaactggaaaaccttgtatgaggtcaaatccgagaacctgggccaaggcgacaagccggactactttagttctgtggccacagtggtgtatcttcgcaaagagaactgcatgtaccaagcctgcccgactcaggactgcaataagaaagtgattgatcaacagaatggattgtaccgctgtgagaagtgcgacaccgaatttcccaatttcaagtaccgcatgatcctgtcagtaaatattgcagattttcaagagaatcagtgggtgacttgtttccaggagtctgctgaagctatccttggacaaaatgctgcttatcttggggaattaaaagacaagaatgaacaggcatttgaagaagttttccagaatgccaacttccgatctttcatattcagagtcagggtcaaagtggagacctacaacgacgagtctcgaattaaggccactgtgatggacgtgaagcccgtggactacagagagtatggccgaaggctggtcatgagcatcaggagaagtgcattgatgtgagaggagcagtgccaatcgggcagaagtttgcaaataggcagaatggaatcgatttcctcccacctccgtgtgacgatcccatgttagctacacagtgcagaggctcttgatggtggactaagcaattcctccctcgtgcgcatctcagaacccatcggtaggcaaaggaaaatacgctcaggtggttgtggtgtagactgtgtcaggcctacggagtcagccagtggctagcgcaagaccagtcactccctctgccttcaggcttctgtcaatttcattatcatcaagcaggaattatgtcgtaagtcactgaccctaactgcagaccatgaagtaaattatgtaactaggtttttgcttctccagtggtgaccacccccccccatccccgctcacaacttgggttcttctcagcggggcgagctgagaagcggtcatgagcacctggggattttagtaagtgtgtcttccta

SEQ ID NO: 5558 - DNA, 2542 bp, Homo sapiens; identical to SEQ ID NO: 2028

SEQ ID NO: 5559 - DNA, 798 bp, Homo sapiens
aaaattctgagctgtacacctctaggaaatgaaacactagttcagaagaagcctgtaaactctcttacaaatacatttggttattcaccatgaggttagcaaagcctaaagcgggtatttctcggagctcaagccaaggaaaggcctatgagaacaagcgcaaaacaggccggcagcgcgagaagtggggcatgactattcgatttgactcaagcttcagtagactcagaagaagcttggatgacaaaccctataaatgtactgaatgtgaaaagagtttcagtcagagttcaactctttttcaacaccagaagatccatactggaaagaaatcccataaatgtgctgattgtgggaaaagtttctttcagagttctaatctcattcagcatcgacggatccatacgggggaaaagccctacaaatgtgatgagtgtggagaaagcttcaaacagagctcaaatctcattcagcaccagagaattcatactggagaaaaaccctatcagtgtgatgagtgtggccggtgtttcagccagagctcccaccttattcaacatcagagaacccacactggggagaaaccctaccagtgcagtgaatgtggcaaatgtttcagtcagagctctcatctgaggcagcacatgaaggtgcataaagaagagaagcctcgtaaaacccggggcaaaaatatcagggtgaagactcacttaccctcttggaaagctggtacagaaggaagtctgtggctggtctccgttaagtatagggctttttgacagctttttgagacctctt

SEQ ID NO: 5560 - DNA, 2685 bp, Homo sapiens
cgaggagagagagagagtaaggagccagccatgaatcctttccagaaaaatgagtccaaggaaactcttttttcacctgtctccattgaagaggtaccacctcgaccacctagccctccaaagaagccatctccgacaatctgtggctccaactatccactgagcattgccttcattgtggtgaatgaattctgcgagcgcttttcctattatggaatgaaagctgtgctgatcctgtatttcctgtatttcctgcactggaatgaagatacctccacatctatataccatgccttcagcagcctctgttattttactcccatcctgggagcagccattgctgactcgtggttgggaaaattcaagacaatcatctatctctccttggtgtatgtgcttggccatgtgatcaagtccttgggtgccttaccaatactgggaggacaagtggtacacacagtcctatcattgatcggcctgagtctaatagctttggggacaggaggcatcaaaccctgtgtggcagcttttggtggagaccagtttgaagaaaaacatgcagaggaacggactagatacttctcagtcttctacctgtccatcaatgcagggagcttgatttctacatttatcacacccatgctgagaggagatgtgcaatgttttggagaagactgctatgcattggcttttggagttccaggactgctcatggtaattgcacttgttgtgtttgcaatgggaagcaaaatatacaataaaccaccccctgaaggaaacatagtggctcaagttttcaaatgtatctggtttgctatttccaatcgtttcaagaaccgttctggagacattccaaagcgacacgactggctagactgggcggctgagaaatatccaaagcagctcattatggatgtaaaggcactgaccagggtactattcctttatatcccattgcccatgttctgggctcttttggatcagcagggttcacgatggactttgcaagccatcaggatgaataggaatttggggttttttgtgcttcagccggaccagatgcaggttctaaatccccttctggttcttatcttcatcccgttgtttgactttgtcatttatcgtctggtctccaagtgtggaattaacttctcatcacttaggaaaatggctgttggtatgatcctagcatgcctggcatttgcagttgcggcacgtgtagagataaaaataaatgaaatggccccagcccagccaggtccccaggaggttttcctacaagtcttgaatctggcagatgatgaggtgaaggtgacagtggtgggaaatgaaaacaattctctgttgatagagtccatcaaatcctttcagaaaacaccacactattccaaactgcacctgaaaacaaaaagccaggattttcacttccacctgaaatatcacaatttgtctctctacactgagcattctgtgcaggagaagaactggtacagtcttgtcattcgtgaagatgggaacagtatctccagcatgatggtaaaggatacagaaagcagaacaaccaatgggatgacaaccgtgaggtttgttaacactttgcataaagatgtcaacatctccctgagtacagatacctctctcaatgttggtgaagactatggtgtgtctgcttatagaactgtgcaaagaggagaataccctgcagtgcactgtagaacagaagataagaacttttctctgaatttgggtcttctagactttggtgcagcatatctgtttgttattactaataacaccaatcagggtcttcaggcctggaagattgaagacattccagccaacaaaatgtccattcggtggcagctaccacaatatgccctggttacagctggggaggtcatgttctctgtcacaggtcttgagttttcttattctcaggctccctctagcatgaaatctgtgctccaggcagcttggctattgacaattgcagttgggaatatcatcgtgcttgttgtggcacagttcagtggcctggtacagtgggccgaattcattttgttttcctgcctcctgctggtgatctgcctgatcttctccatcatgggctactactatgttcctgtaaagacagaggatatgcggggtccagcagataagcacattcctcacatccaggggaacatgatcaaactagagaccaagaagacaaaactctgatgactccctagattctgtcctaaccccaattccctggccctgtcttgaagcattttttttcttctactggattagacaagagagatagcagcatatcagagctgatctcctccacctttctccaatgacagaagttccaggactggttttccagtacatctttaaacaaggccccagagactctatgtctgcccgtccatcagtgaactcattaaaacttgtgcagtgttgctggagctggcctggtgtctccaaatgaccatgaaaatacacacgtataatggagatcattctctgtgggtatgcaaagttatgggaattcctttataggtaactgccatttaggactgatggccctaatttttgaggtgctgatttagaggcaaaattgcagaataacaaagaaatggtatttcaagtttttttttttataagcaatgtaattatgctattcacaggggcccg

SEQ ID NO: 5561 - DNA, 1972 bp, Homo sapiens
gggtgtgatggggcagaggaacttacgttatgatagtacaagacagaggttgagcctcattttaataggcattgtggtgggtgttgaatagtgatggaatgtatgggtctggaatcaggctgcctggtcaagggctctgaaacatgagtgtgcatcagaatcacctcgaggcttgttaaaggataggctgtggaccacatctcctcagttgctgattcagtgggtgtgggtggggcctgagaattcacatttctcactggtgatgctgctgttactgagtttgggaccacatttggagaaccactggtctagaattgagaggttggcaaaccttctctgttaagaggtagatagtaaatattttaggccttctgggctacaaagagtatctgttacatattttttattgcttttcatgacccattaagcatatatatatcattctctgccatatacaaacaggctgttgggggagtgaggatgatgtagggaaggtggggcatggtttaataacccctgggccatgcctagatgatcagtcctctgccacatagctggctgacctttgccaagttaatcaccttttacctttattttctcatgtttctaataaaacagagacgataatattcatacttcttaccatatagaacttctgaggattcagtgagcaaagccacaaaagatggtatgtcacaatatctgggatatagctagaatttataatttatttttactctgttgataggcaatgggaaaacagtaagaggcagaccaacagtgatccagggctctgaaagctaattgcttcaagatcctgctaccattttcttttgggccgcttgcaaagaagaatcctttgactgaagcatgtatgtacactctgaagtacagcctgggttagtctcttataagggatcggatcattgctcagcctctcccttgagtggcacttagaaaatggcgctattcgtaagctgactggtattgggcccaggactctggctgaaggggtgggcatgctggtaaccatttgcaacctatgctcaggtcctacttgttgggaagccctgattgagaagagtggcctggtctgtgctggcattagataggatctggctgcattaatattgaaactactctgccttttatgtctcattttgcctcatggtgggagtgaaagtgagaaccacagaaaatctgcctgccaggtgttccacatttcttgtgctacagcatgcaagtgagcagtgaggtgttaccttttcctcatgtagctgggaaagcaatacccctgcttgtacctctggcatatcttctctgtgctggtgcacctagagaggttgcctggtggccctgagagaccatctcatcactaaacactgatggtgaaagctggccatgctcaaataagatgtagcaatctacctcttctttgtctagttacccccaagggggcatccactttcttgctcacctcaccagttgcattgttctagtccttgccagaagcacataataatgactttgtaagcttaagttacaggcacacaaaagggcctgatggtgatatgactccaccctccccgtttttgctgacattccgccaaatatccttctgtctcctccccaccttgcaaaacaaacttgctgttttgaatttggtccaggctggaacagccccactacacctgttaacacacgcagacgcacacttcccccttcataattgcttagcttcttgttgcctagccagatttcccctcagcttacagttcctgaatcataagatattgaaccagcaaatttaagagttgacattttacttagaggtattcaagtgaaaacatggcttctggtttattttgctgtattgtgccatgaccacttggctaattcttctcctccttcacagcagcagaatggaagtgaggaaaggcaaccagctgacacaggagccagagtgagacca

SEQ ID NO: 5562 - DNA, 1857 bp, Homo sapiens
gccccggccccgccccagccctcctgatccctcgcagcccggctccggccgcccgcctctgccgccgcaatgatgatgatggcgctgagcaagaccttcgggcagaagcccgtgaagttccagctggaggacgacggcgagttctacatgatcggctccgaggtgggaaactacctccgtatgttccgaggttctctgtacaagagatacccctcactctggaggcgactagccactgtggaagagaggaagaaaatagttgcatcgtcacatggtaaaaaaacaaaacctaacactaaggatcacggatacacgactctagccaccagtgtgaccctgttaaaagcctcggaagtggaagagattctggatggcaacgatgagaagtacaaggctgtgtccatcagcacagagccccccacctacctcagggaacagaaggccaagaggaacagccagtgggtacccaccctgtccaacagctcccaccacttagatgccgtgccatgctccacaaccatcaacaggaaccgcatgggccgagacaagaagagaaccttccccctttgctttgatgaccatgacccagctgtgatccatgagaacgcatctcagcccgaggtgctggtccccatccggctggacatggagatcgatgggcagaagctgcgagacgccttcacctggaacatgaatgagaagttgatgacgcctgagatgttttcagaaatcctctgtgacgatctggatttgaacccgctgacgtttgtgccagccatcgcctctgccatcagacagcagatcgagtcctaccccacggacagcatcctggaggaccagtcagaccagcgcgtcatcatcaagctgaacatccatgtgggaaacatttccctggtggaccagtttgagtgggacatgtcagagaaggagaactcaccagagaagtttgccctgaagctgtgctcggagctggggttgggcggggagtttgtcaccaccatcgcatacagcatccggggacagctgagctggcatcagaagacctacgccttcagcgagaaccctctgcccacagtggagattgccatccggaacacgggcgatgcggaccagtggtgcccactgctggagactctgacagacgctgagatggagaagaagatccgcgaccaggacaggaacacgaggcggatgaggcgtcttgccaacacgggcccggcctggtaaccagcccatcagcacacggctcccacggagcatctcagaagattgggccgcctctcctccatcttctggcaaggacagaggcgaggggacagcccagcgccatcctgaggatcgggtgggggtggagtgggggcttccaggtggcccttcccggtacacattccatttgttgagccccagtcctgccccccaccccaccctccctacccctccccagtctctggggtcaggaagaaaccttattttaggttgtgttttgtttttgtataggagccccaggcagggctagtaacagtttttaaataaaaggcaacaggtcatgttcaatttcttaaatctagtgtctttatttcttctgttacaatagtgttgcttgtgtaagcaggttagagtgcacagtgtccccaattgttcctggcactgcaaaaccaaattaaacaatcccacaaagaattctgacatcaatgtgttttcctcagtcaggtctatttcaagattctagaagttccttttgtaaaacttgcctttaaaactcttcctcctaatgccatcagatctcttaacattggctcactgtgggatctttcctcttaggttgaatttctacgtgaatatcaaagtgcctttttc

SEQ ID NO: 5563 - DNA, 2553 bp, Homo sapiens
ctaaaggccttgcacaacatcagagagttcatactggagagaaccttacacatttcacgagtatggaaagacctttgctcaaaattcagcccttgtaatgcataaggcaattcatactggaaagaaaccttacacatgtaatgaatgtggcaaggtttttagtagaaaagcacaccttgcatgtcatcatagacttcatactgtctaaggtttctaatcaacaatcaaaccttgcacaacatcagagagtttatactggagagaaaccttacaagtgtaatgagtggggcaaagccttaagtgggaagtcgtcacttttttatcatcaagcaatccatggtgtagggaaactttgcaaatgtaatgattgtcacaaagtcttcagtaatgctacaaccattgcaaatcactggagaatccataatgaagacagatcttacaagtgtaataaatgtggtaaaattttcagacatcgatcatatcttgcagtttatcagcgaactcatactggagagaaaccttacaaatatcatgactgtggcaaggtcttcagtcaagcttcatcctatgcaaaacataggagaattcatacaggagagaaacctcacaagtgtgatgattgtggcaaagtcttgacttcacgttcacacctcattagacatcagagaatccatactggacagaaatcttacaaatgtcttaagtgtggcaaggtcttcagtctgtgggcactccatgcagaacatcagaaaattcatttttgagataactgttccaaatacagtgactatagaagatcataaagctttaattgacattagagccaaataggcattgacttgagattgagttgacttaaccttgagtttaagaattaatttacattaaagtgtttatgttaagaagattgggccaggtgggattacaggcgcgagcaccgcgcccggcccctaagttaatatttcaaacaatcgaaggtaaaacaacatattgtgttgggccacctgtactgaacgctgaatcgtttttcctcttaagttgaaaatggttttaatgcaaagcgcctttttttgagcaggtagagtcacgcatccggcaggcggggcgagctcccctctgtctggggcagggtgggggagaggggcagggacctcggtaaaggggtggagtggcgcgctggttgccgcgggcactggcaattagaagggattattaaactaagcaaggtcctgggttgtttgagtggataatggaaactgaaaggtgacgtgcaaaactgcctattactcccaggagtggaggataatttcatatttcatggaaataaactcagggcccggagcggtggctcacacctgtaatcccagcactttgagaggccaaggagggaggatcgcttaagcccaggaattcgaaatcagcctaggcaacatagtaagacctcatctctactaaaaataaaaaaaaacagccaggtgtgttagtccacacctgtggtcccagctgcctcagcttcccgagtagctgggattacaggtatgaaccactatgcccggctaactttgttttttttttttagaaattaaaccttttttcagcttaatgacccaggggtgtatttttgaaggacttgggagctctctttgaaaggcaaacaacaagggaaacagtacctttatctcagtaggaaattaaataattcaaacatcaaataacttcaatttaaggctatggactttgagataattctgagccttgagaggaatgtggtcaggcaacctgagtccagtggaatgcaggtgcaacttctaagagttttcctgtaagtaattaagaagactaagtagccccagagataagacctcctcggatcattgtcccttcttatgtagtgataaagtaaccttccttgaagtgtatctatccgtaatcaatcaagttgctgcagcctatgcactggcccagaataaaaaacgtggtgattctgctaaagcttctctgtctttccctgtgtgtgaaatcttaacgtctctacttgggaacgctgatcccattcatttagagttgatgtttccacgtggctatttccaagctttgccttcaaataaattctgtacttaatcatatattctaaattttattatttactgctgacatcagtttctgtcggattgtaggagcctcaccagagagggcccctgtcgccatgttgtaaaactcacacttgccaaaagttgtgggttagggtttctccccctccctcaggatgacgctagttagctgacacagatggtcacctccattaccaagtagagtcaggatgaactatgtgtgactgttcaactatgtgtcctcttccctgaggactgattagtgtttatcttgaaaacatgtccttaatgggttgtatagaacactgaagcatctgatttcaaactcttagctcttttcctctatttcccatcacattctggtctaaggcttatttattaataaaatgatttttatttctttaaacaaaaaaaactttagagcacactggggtaccggatc

SEQ ID NO: 5564 - DNA, 2258 bp, Homo sapiens
gatatcacagcaacattgaaatgctaaaaagtttttaaacactctcaatttctaattcaccatgtcacagactggtgaaaaaaaaaaaaaaagcggccgcttccccccggccgggcccccgccgccccgcggtccccagagcgccaggcccccggggggagggagggagggcgccgggccggtgggagccagcggcgcgcggtgggacccacggagccccgcgacccgccgagcctggagccgggccggctcggggaagccggctccagcccggagcgaacttcgcagcccgtcggggggcggcggggagggggcccggagccggaggagggggcggccgcgggcacccccgcctgtgccccggcgtccccgggcaccatgctgtccaactcccagggccagagcccgccggtgccgttccccgccccggccccgccgccgcagccccccacccctgccctgccgcaccccccggcgcagccgccgccgccgcccccgcagcagttcccgcagttccacgtcaagtccggcctgcagatcaagaagaacgccatcatcgatgactacaaggtcaccagccaggtcctggggctgggcatcaacggcaaagttttgcagatcttcaacaagaggacccaggagaaattcgccctcaaaatgcttcaggactgccccaaggcccgcagggaggtggagctgcactggcgggcctcccagtgcccgcacatcgtacggatcgtggatgtgtacgagaatctgtacgcagggaggaagtgcctgctgattgtcatggaatgtttggacggtggagaactctttagccgaatccaggatcgaggagaccaggcattcacagaaagagaagcatccgaaatcatgaagagcatcggtgaggccatccagtatctgcattcaatcaacattgcccatcgggatgtcaagcctgagaatctcttatacacctccaaaaggcccaacgccatcctgaaactcactgactttggctttgccaaggaaaccaccagccacaactctttgaccactccttgttatacaccgtactatgtggctccagaagtgctgggtccagagaagtatgacaagtcctgtgacatgtggtccctgggtgtcatcatgtacatcctgctgtgtgggtatccccccttctactccaaccacggccttgccatctctccgggcatgaagactcgcatccgaatgggccagtatgaatttcccaacccagaatggtcagaagtatcagaggaagtgaagatgctcattcggaatctgctgaaaacagagcccacccagagaatgaccatcaccgagtttatgaaccacccttggatcatgcaatcaacaaaggtccctcaaaccccactgcacaccagccgggtcctgaaggaggacaaggagcggtgggaggatgtcaaggggtgtcttcatgacaagaacagcgaccaggccacttggctgaccaggttgtgagcagaggattctgtgttcctgtccaaactcagtgctgtttcttagaatccttttattccctgggtctctaatgggaccttaaagaccatctggtatcatcttctcattttgcagaagagaaactgaggcccagaggcggagggcagtctgctcaaggtcacgcagctggtgactggttggggcagaccggacccaggtttcctgactcctggcccaagtctcttcctcctatcctgcgggatcactggggggctctcagggaacagcagcagtgccatagccaggctctctgctgcccagcgctggggtgaggctgccgttgtcagcgtggaccactaaccagcccgtcttctctctctgctcccacccctgccgcctcacctgcccttgttgtctctgtctctcactgtctcttctgctgtctctctactgtcttctggctctctctgtacccttcctggtgctgccgtgcccccaggaggagatgaccagtgccttggccacaatgcgcgttgactacgagcagatcaagataaaaaagattgaagatgcatccaaccctctgctgctgaagaggcggaagaaagctcgggccctggaggctgcggctctggcccactgagccaccgcgccctcctgcccacgggaggacaagcaataactctctacaggaatatattttttaaacgaagagacagaactgtccacatctgcctcctctcctcctcagctgcatggagcctggaactgcatcagtgactgaattc

SEQ ID NO: 5565 - DNA, 1100 bp, Homo sapiens
agtccccaacatggcggctccccaagacgtccacgtccggatctgtaaccaagagattgtcaaatttgacctggaggtgaaggcgcttattcaggatatccgtgattgttcaggacccttaagtgctcttactgaactgaatactaaagtaaaagagaaatttcaacagttgcgtcacagaatacaggacctggagcagttggctaaagagcaagacaaagaatcagagaaacaacttctactccaggaagtggagaatcacaaaaagcagatgctcagcaatcaggcctcatggaggaaagctaatctcacctgcaaaattgcaatcgacaatctagagaaagcagaacttcttcagggaggagatctcttaaggcaaaggaaaaccaccaaagagagcctggcccagacatccagtaccatcactgagagcctcatggggatcagcaggatgatggcccagcaggtccagcagagcgaggaggccatgcagtctctagtcacttcttcacgaacgatcctggatgcaaatgaagaatttaagtccatgtcgggcaccatccagctgggccggaagcttatcacaaaatacaatcgccgggagctgacggacaagcttctcatcttccttgcgctacgcctgtttcttgctacggtcctctatattgtgaaaaagcggctctttccatttttgtgagatcccaaaggtgccagttctggccctttcagctcctgtttcaggatctgtcctggttcctgagctctaggctgctaagctgagccacacacccctccgttttgcaccagttgcctgcaggttggatggaacacagtgccccacttttctgcaagtagctggcttgtaaagggtgaacagagccatgggaggaaggtctggcattgggatgccgccctggggacatacgaaccgcctccttccaccattgtgcactatgggaggccgctgctgcgtggagcacttaaagtccagcctccaggaccggatgcccctcctgtctcccgctcccatcgtgcccttaaatgccagatctggtggagggaagagagaagaggtaggaagaaaggtgatgaaaactcct

SEQ ID NO: 5566 - DNA, 4198 bp, Homo sapiens
ctgctatcaaaaaggccataaggattttgtccccaaatttcacatgagctaccttgcttcaaactactgagatgaagggggcaagattatttgtccttctttctagtttatggagtgggggcattgggcttaacaacagtaagcattcttggactatacctgaggatgggaactctcagaagactatgccttctgcttcagttcctccaaataaaatacaaagtttgcaaatactgccaaccactcgggtcatgtcggcggagatagctacaactccagaggcaagaacttctgaagacagtcttcttaaatcaacactgcctccctcagaaacaagtgcacctgctgagggtgtgagaaatcaaactctcacatccacagagaaagcagaaggagtggtcaagttacagaatcttaccctcccaaccaacgctagcatcaagttcaatcctggagcagaatcagtggtcctttccaattctacactgaaatttcttcagagctttgccagaaagtcaaatgaacaagcaacttctctaaacacagttggaggcactggaggcattggaggcgttggaggcactggaggcgtgggaaatcgagccccacgggaaacatacctcagccggggtgacagcagttccagccaaagaactgactaccaaaaatcaaatttcgaaacaactagaggaaagaattggtgtgcttatgtacataccaggttatctcccacagtgacattggacaaccaggtcacttatgtcccaggtgggaaaggaccttgtggctggaccggtggatcctgtcctcagagatctcagaagatatccaatcctgtctataggatgcaacataaaattgtcacctcattggattggaggtgctgtcctggatacagtgggccgaaatgtcaactaagagcccaggaacagcaaagtttgatacacaccaaccaggctgaaagtcatacagctgttggcagaggagtagctgagcagcagcagcagcaaggctgtggtgacccagaagtgatgcaaaaaatgactgatcaggtgaactaccaggcaatgaaactgactcttctgcagaagaagattgacaatatttctttgactgtgaatgatgtaaggaacacttactcctccctagaaggaaaagtcagcgaagataaaagcagagaatttcaatctcttctaaaaggtctaaaatccaaaagcattaatgtactgataagagacatagtaagagaacaatttaaaatttttcaaaatgacatgcaagagactgtagcacagctcttcaagactgtatcaagtctatcagaggacctcgaaagcaccaggcaaataattcaaaaagttaatgaatctgtggtttcaatagcagcccagcaaaagtttgttttggtgcaagagaatcggcccactttgactgatatagtggaactaaggaatcacattgtgaatgtaaggcaagaaatgactcttacatgtgagaagcctattaaagaactagaagtaaagcagactcatttagaaggtgctctagaacaggaacactcaagaagcattctgtattatgaatccctcaataaaactctttctaaattgaaggaagtacatgagcagcttttatcaactgaacaggtatcagaccagaagaatgctccagctgctgagtcagttagcaataatgtcactgagtacatgtctactttacatgaaaatataaagaagcagagtttgatgatgctgcaaatgtttgaagatttgcacattcaagaaagcaagattaacaatctcaccgtctctttggagatggagaaagagtctctcagaggtgaatgtgaagacatgttatccaaatgcagaaatgattttaaatttcaacttaaggacacagaagagaatttacatgtgttaaatcaaacattggctgaagttctctttccaatggacaataagatggacaaaatgagtgagcaactaaatgatttgacttatgatatggagatccttcaacccttgcttgagcagggagcatcactcagacagacaatgacatatgaacaaccaaaggaagcaatagtgataaggaaaaagatagaaaatctgactagtgctgtcaatagtctaaattttattatcaaagaacttacaaaaagacacaacttacttagaaatgaagtacagggtcgtgatgatgccttagaaagacgtatcaatgaatatgccttagaaatggaagatggcctcaataagacaatgactattataaataatgctattgatttcattcaagataactatgccctaaaagagactttaagtactattaaggataatagtgagatccatcataaatgtacctccgatatggaaactattttgacatttattcctcagttccaccgtctgaatgattctattcagactttggtcaatgacaatcagagatataactttgttttgcaagtcgccaagacccttgcaggtattcccagagatgagaaactaaatcagtccaacttccaaaagatgtatcaaatgttcaatgaaaccacttcccaagtgagaaaataccagcaaaatatgagtcatttggaagaaaaactactcttaactaccaagatttccaaaaattttgagactcggttgcaagacattgagtctaaagttacccagacgctcataccttattatatttcagttaaaaaaggcagtgtagttacaaatgagagagatcaggctcttcaactgcaagtattaaattccagatttaaggcgttggaagcaaaatctatccatctttcaattaacttcttttcgcttaacaaaactctccacgaagttttaacaatgtgtcacaatgcttctacaagtgtgtcagaactgaatgctaccatccctaagtggataaaacattccctgccagatattcaacttcttcagaaaggtctaacagaatttgtggaaccaataattcaaataaaaactcaagctgccctatctaattcaacttgttgtatagatcgatcgttgcctggtagtctggcaaatgttgtcaagtctcagaagcaagtaaaatcattgccaaagaaaattaacgcacttaagaaaccaacggtaaatcttaccacagtcctgataggccggactcaaagaaacacggacaacataatatatcctgaggagtattcaagctgtagtcggcatccgtgccaaaatgggggcacgtgcataaatggaagaactagctttacctgtgcctgcagacatccttttactggtgacaactgcactatcaagcttgtggaagaaaatgctttagctccagatttttccaaaggatcttacagatatgcacccatggtggcattttttgcatctcatacgtatggaatgactatacctggtcctatcctgtttaataacttggatgtcaattatggagcttcatataccccaagaactggaaaatttagaattccgtatcttggagtatatgttttcaagtacaccatcgagtcatttagtgctcatatttctggatttttagtggttgatggaatagacaagcttgcatttgagtctgaaaatattaacagtgaaatacactgtgatagggttttaactggggatgccttattagaattaaattatgggcaggaagtctggttacgacttgcaaaaggaacaattccagccaagtttccccctgttactacatttagtggctatttattatatcgtacataagttagtatgaaaaacagactatcacctttattgagaaacagccagtgttttcatttatctttgcttgcacatctgctctgttttggtttttctacaggaaatgaaaatcaacttgtttttttaatatgagtaaacttgtatgtctattttataaaattatttgaatattgtttaatgtctgaatatgaaagagttcttgatcctaaagaaatttagtggcacagaaaacaaagtgaatttgttagcataattattcctattcttatttcttcattttaagtcattgcaatggaaagtaatattataaaacggtaattacaacatattatcagtcacagttttctttccaattaaacacttaacttttgttattccctgtatataaatatataacacacattttctagattcacaaatttaaataaattactcaaaaaatg

SEQ ID NO: 5567 - DNA, 2002 bp, Homo sapiens
tataacgtgagggctgaatgcagcccattctctggagaacttcctcacacaccgcagcaaagagaagactgaaagacaaacctgggtgcagccagagaggtccagatagatgagcttgtggcatccattccccaagttcagcctagggactccacgtaccccagctgggtctcattgttccagaactgcattagttaagattacccagacttggatttcaaaggaatactttcattgttccgtctgtaacacgaagtaattggggccagctggatgtcaggatgcgtgtggttaccattgtaatcttgctctgcttttgcaaagcggctgagctgcgcaaagcaagcccaggcagtgtgagaagccgagtgaatcatggccgggcgggtggaggccggagaggctccaacccggtcaaacgctacgcaccaggcctcccgtgtgacgtgtacacatatctccatgagaaatacttagattgtcaagaaagaaaattagtttatgtgctgcctggttggcctcaggatttgctgcacatgctgctagcaagaaacaagatccgcacattgaagaacaacatgttttccaagtttaaaaagctgaaaagcctggatctgcagcagaatgagatctctaaaattgagagtgaggcgttctttggtttaaacaaactcaccaccctcttactgcagcacaaccagatcaaagtcttgacggaggaagtgttcatttacacacctctcttgagctacctgcgtctttatgacaacccctggcactgtacttgtgagatagaaacgcttatttcaatgttgcagattcccaggaaccggaatttggcgaactacgccaagtgtgaaagtccacaagaacaaaaaaataaaaaactgcggcagataaaatctgaacagttgtgtaatgaagaagaaaaggaacaattggacccgaaaccccaagtgtcagggagacccccagtcatcaagcctgaggtggactcaactttttgccacaattatgtgtttcccatacaaacactggactgcaaaaggaaagagttgaaaaaagtgccaaacaacatccctccagatattgttaaacttgacttgtcatacaataaaatcaaccaacttcgacccaaggaatttgaagatgttcatgagctgaagaaattaaacctcagcagcaatggcattgaattcatcgatcctgggtctttgagatgaaaccctgcaagtagacttacgtgaatgatttttgctgtgccgcttttttagggctcacacatttagaagaattagatttatcaaacaacagtctgcaaaactttgactatggcgtattagaagacttgtattttttgaaactcttgtggctcagagataacccttggagatgtgactacaacattcactacctctactactggttaaagcaccactacaatgtccattttaatggcctggaatgcaaaacgcctgaagaatacaaaggatggtctgtgggaaaatatattagaagttactatgaagaatgccccaaagacaagttaccagcatatcctgagtcatttgaccaagacacagaagatgatgaatgggaaaaaaaacatagagatcacaccgcaaagaagcaaagcgtaataattactatagtaggataaggtagaaattgttctgattgtaattagttttgtattttctatactggtgttagaaaacatatgtttacatttgattaactgtgttgcctatttatgcagggtaatccagctaaaggaagctttctttaattataagtattattgtgactattatagtaatcaagagaatgctatcatcctgcttgcctgtccatttgtggaacagcatctggtgatatgcaattccacactggtaacctgcagcagttgggtcctaatgatggcattagactttcataatgtcctgtataaatgtttttactgcttttagaaaataaagaaaaaaaacttggttcatgttta

SEQ ID NO: 5568 - DNA, 1358 bp, Homo sapiens; identical to SEQ ID NO: 2032

SEQ ID NO: 5569 - DNA, 6568 bp, Homo sapiens
  misc_feature (1)..(6568): n=a,t,g or c
gaaggcgagcacccagacgggggcccgccggggtcgcggccagcgccggggaaatgccgcgccggggagcagcatgcgccggcctgagcccttccctttgcactcggctgttttttacgtttaaccagaaaggaagggagaggagggaaagatccatgtggctgccctcttccgatcacaaatattgtcgggaaggctactggccggaaagcgccgctgtggctgagagcgaagtttcagagactcttatttaaactgggttgttacattcaaaaaaactgcggcaagttcttggttgtgggcctcctcatatttggggccttcgcggtgggattaaaagcagcgaacctcgagaccaacgtggaggagctgtgggtggaagttggaggacgagtaagtcgtgaattaaattatactcgccagaagattggagaagaggctatgtttaatcctcaactcatgatacagacccctaaagaagaaggtgctaatgtcctgaccacagaagcgctcctacaacacctggactcggcactccaggccagccgtgtccatgtatacatgtacaacaggcagtggaaattggaacatttgtgttacaaatcaggagagcttatcacagaaacaggttacatggatcagataatagaatatctttacccttgtttgattattacacctttggactgcttctgggaaggggcgaaattacagtctgggacagcatacctcctaggtaaacctcctttgcggtggacaaacttcgaccctttggaattcctggaagagttaaagaaaataaactatcaagtggacagctgggaggaaatgctgaataaggctgaggttggtcatggttacatggaccgcccctgcctcaatccggccgatccagactgccccgccacagcccccaacaaaaattcaaccaaacctcttgatatggcccttgttttgaatggtggatgtcatggcttatccagaaagtatatgcactggcaggaggagttgattgtgggtggcacagtcaagaacagcactggaaaactcgtcagcgcccatgccctgcagaccatgttccagttaatgactcccaagcaaatgtacgagcacttcaaggggtacgagtatgtctcacacatcaactggaacgaggacaaagcggcagccatcctggaggcctggcagaggacatatgtggaggtggttcatcagagtgtcgcacagaactccactcaaaaggtgctttccttcaccaccacgaccctggacgacatcctgaaatccttctctgacgtcagtgtcatccgcgtggccagcggctacttactcatgctcgcctatgcctgtctaaccatgctgcgctgggactgctccaagtcccagggtgccgtggggctggctggcgtcctgctggttgcactgtcagtggctgcaggactgggcctgtgctcattgatcggaatttcctttaacgctgcaacaactcaggttttgccatttctcgctcttggtgttggtgtggatgatgtttttcttctggcccacgccttcagtgaaacaggacagaataaaagaatcccttttgaggacaggaccggggagtgcctgaagcgcacaggagccagcgtggccctcacgtccatcagcaatgtcacagccttcttcatggccgcgttaatcccaattcccgctctgcgggcgttctccctccaggcagcggtagtagtggtgttcaattttgccatggttctgctcatttttcctgcaattctcagcatggatttatatcgacgcgaggacaggagactggatattttctgctgttttacaagcccctgcgtcagcagagtgattcaggttgaacctcaggcctacaccgacacacacgacaatacccgctacagccccccacctccctacagcagccacagctttgcccatgaaacgcagattaccatgcagtccactgtccagctccgcacggagtacgacccccacacgcacgtgtactacaccaccgctgagccgcgctccgagatctctgtgcagcccgtcaccgtgacacaggacaccctcagctgccagagcccagagagcaccagctccacaagggacctgctctcccagttctccgactccagcctccactgcctcgagcccccctgtacgaagtggacactctcatcttttgctgagaagcactatgctcctttcctcttgaaaccaaaagccaaggtagtggtgatcttcctttttctgggcttgctgggggtcagcctttatggcaccacccgagtgagagacgggctggaccttacggacattgtacctcgggaaaccagagaatatgactttattgctgcacaattcaaatacttttctttctacaacatgtatatagtcacccagaaagcagactacccgaatatccagcacttactttacgacctacacaggagtttcagtaacgtgaagtatgtcatgttggaagaaaacaaacagcttcccaaaatgtggctgcactacttcagagactggcttcagggacttcaggatgcatttgacagtgactgggaaaccgggaaaatcatgccaaacaattacaagaatggatcagacgatggagtccttgcctacaaactcctggtgcaaaccggcagccgcgataagcccatcgacatcagccagttgactaaacagcgtctggtggatgcagatggcatcattaatcccagcgctttctacatctacctgacggcttgggtcagcaacgaccccgtcgcgtatgctgcctcccaggccaacatccggccacaccgaccagaatgggtccacgacaaagccgactacatgcctgaaacaaggctgagaatcccggcagcagagcccatcgagtatgcccagttccctttctacctcaacggcttgcgggacacctcagactttgtggaggcaattgaaaaagtaaggaccatctgcagcaactatacgagcctggggctgtccagttaccccaacggctaccccttcctcttctgggagcagtacatcggcctccgccactggctgctgctgttcatcagcgtggtgttggcctgcacattcctcgtgtgcgctgtcttccttctgaacccctggacggccgggatcattgtgatggtcctggcgctgatgacggtcgagctgttcggcatgatgggcctcatcggaatcaagctcagtgccgtgcccgtggtcatcctgatcgcttctgttggcataggagtggagttcaccgttcacgttgctttggcctttctgacggccatcagcgacaagaaccgcagggctgtgcttgccctggagcacatgtttgcacccgtcctggatggcgccgtgtccactctgctgggagtgctgatgctggcgggatctgacttcgacttcattgtcaggtatttctttgctgtgctggcaatcctcaccatcctcggcgttctcaatgggctggttttgcttcccgtgctttggtctttctttggaccatatcctgaggtgtctccagccaacggcttgaaccgcctgcccacaccctcccctgagccaccccccagcgtggtccgcttcgccatgccgcccggccacacgcacagcgggtctgattcctccgactcggagtatagttcccagacgacagtgtcaggcctcagcgaggagcttcggcactacgaggcccagcagggcgcgggaggccctgcccaccaagtgatcgtggaagccacagaaaaccccgtcttcgcccactccactgtggtccatcccgaatccaggcatcacccaccctcgaacccgaaacagcagccccacctggactcagggtccctgcctcccggacggcaaggccagcagccccgcagggacccccccagaaaaggcttgtggccacccctctacagaccgcgcagagacgcttttgaaatttctactgaagggcattctggccctagcaatagggcccgctggggccctcgcggggcccgttctcacaaccctcggaacccaacgtccactgccatgggcagctccgtgcccggctactgccagcccatcaccactgtgacggcttctgcctccgtgactgtcgccgtgcacccgccgcctgtccctgggcctgggcggaacccccgagggggactctgcccaggctaccctgagactgaccacggcctgtttgaggacccccacgtgcctttccacgtccggtgtgagaggagggattcgaaggtggaagtcattgagctgcaggacgtggaatgcgaggagaggccccggggaagcagctccaactgagggtgattaaaatctgaagcaaagaggccaaagattggaaaccccccacccccacctctttccagaactgcttgaagagaactggttggagttatggaaaagatgccctgtgccaggacagcagttcattgttactgtaaccgattgtattattttgttaaatatttctataaatatttaagagatgtacacatgtgtaatataggaaggaaggatgtaaagtggtatgatctgggccttctccactcctgccccagagtgtggaggccacagtggggcctctccgtatttgtgcattgggctccgtgccacaaccaagcttcattagtcttaaatttcagcatatgttgctgctgcttaaatattgtataatttacttgtataattctatgcaaatattgcttatgtaataggattattttgtaaaggtttctgtttaaaatattttaaatttgcatatcacaaccctgtggtagtatgaaatgttactgttaactttcaaacacgctatgcgtgataatttttttgtttaatgagcagatatgaagaaagcacgttaatcctggtggcttctctaggtgtcgttgtgtgcggtcctcttgtttggctgtgcgtgtgaacacgtgtgtgagttcaccatgtactgtactgtgatttttttttttgtcttgttttgtttctctacactgtctgtaacctgtagtaggctctgacctattcaggctggaaagcgtcaggatatcttttcttcgtgctggtgagggctggccctaaacatccacctaatcctttcaaatcagcccggcaaaagctaaactctcctcgtgtctacgggcatctgttatgatcattggctgccatccaggaccccaatttgtgcttcagggggataatctccttctctcggatcattgtgatggatgctggaacctcagggtatggagctcacatcagttcatcatggtgggtgttagagaattcggtgacatgcctagtgctgagccttggctgggccatgagagtctgtataataaaaaaagcatgcagcatggtgcccctcttttgaccaacacacacaagacccctcccccaacacccccaaattcaagagtggatgtggccctgtcacaggtagaaaaacctatttagttaattctttcttggcccacagtctcccagaaatgatgttttgagtccctatagtttaaagtccctctcttaaatggagcagctggtttgaggtttctaaatctgtttgcattttctttaaaattaagtggtgagcatgcattgtggtgtagaggcaggcattatgtaggataagagctccggggggattcttcatgcaccagtgtttagggtacgtgcttcctaagtaaatccaaacattgtctccatcctccccgtcattagtgctctttcaatgtgatgtgggaaagcaggaggatggacacaccccactgaaagatgtaggcaggggcaggtctctcaaccaggcatatttttaaaagttgcttctgtactggttctcttcttttgctctgaggtgtgggctccctcatctcgtaaccagagaccagcacatgtcagggaagcacccagtgtcggctccccatcccaatccacaccagcaccttgttacagacaagaagtcagaggaaagggcggggtccctgcagggctgaagcctaagctactgtgaggtgctcacaagtggcagctcctgtaatcccttttaaattacgtgggaatcttaacagaaagtaatgggcccccagaaatacccacagcataggacntcagaccctgaactcaccacaaaattttaagatgctgattgggagccgcttgtggctgctggatgngtgtgtgtgtgtgtgtgtgtgcgtgcgtgcgtgtgtgtgtgtgtctgntggggaccctggccacccccctgctgctgtcttggtgcctgtcacccacatggtctgccatcctaacacccagctctgctcagaaaacgtcctgcgtggaggagggatgatgcagaattctgaagtcgacttccctctggctcctggcgtgccctcgctcccttcctgagcccagctcgtgttgcgccggaggctgcgcggcccctgatttctgcatggtgtagaactttctccaatagtcacattggcaaagggagaactggggtgggcggggggtggggctggcagggaattagcatttctctctctcttttaatagttaa

SEQ ID NO: 5570 - DNA, 4465 bp, Homo sapiens
gagctcacagagcccccagctggggcatatctggtttccgggggcaggggcgatacccagaggaggaagaagggattctgagagagcccaacaggctccgagcctcaggctggagctgagcttggggcagcaaggaaggaccaggtgcgagggcagaaccatgcggcccgacccctgcagcacggcctgtggcctcccccagctcctgcccgtgcttctgggtcagtctggactttgccacttctgaccaaaagccaccgcaaacccactcaagccaaaagaggaagtgaccgttaggcccaactgggaaggctggcggccaggggcactccaggcagggcgaggggggcggccgggggcgctccaggcggggcgagggagacacccagaactccaggcaggagtcctcgggtgccacctttcctctccacctggccctgcgtgggctctgtcctcagggtggcccgccgtagtccccctccccactctgagtttcctgtcccaaagtcctaaggaagtttccagaactacatctcaccatcttgagtcagccttggctcagtgtccatctcacaggcctggaaggggcaggagtcagcactgtccagaccacagggcctgagtgtggggagggcagccgtctaggaaggtggtggagggttgttaccttgaggcaagagggctgcggggcagaaagacacagcaggtgactgttgtgggaggcccaagagaggcctgggagagggatggcccacaagggctgaccctcccgccacccagggggccttggacaggtttcctcctggcagggtggcccttgtgcatggaacccctacaacgactaaggctggcaggcatgaggtttcctgaaggagaaagagcttgtggggcccagtgtggctgggggggcgctgggactccattctgaagccaaaggcactgggaagggcttccgcagaggagggtttggcaggggttgccaggaacagcctggatggggacagggaacagataaggtgggtggaggagttagccgggagcctggggctggctccagcatgatgtgggggtctgcaaggccctggagaaagtggggtggtgcagcagggggcacacccacagctggagctgacccagatggacagcttgggctctgccacgcgggactaggcaaggaaggggcacgaacaagcaggaagtggtgaggcggtctccagctagctgctctcccctgcccagactttggtttcctccctgctggcttggcctggctccctggctctgtgtggtatggtcacacccccgtgcaccccctccactgagatggggcggggagagcaccgaggctgctcttcctctcctgggccgtcctctgagcagcagacggggctaagcgttccccagctcgccttcacacacagcccgtgccaccacaccgacggtaccatgaaggacgaggtagctctactggctgctgtcaccctcctgggagtcctgctgcaaggtgggctggttcctatctaggaagagggtgggccttagatccctacagcttgccctctgccccctaggcccaggtggagggcagaggtggggactccagcccaggcccaagctggaagagggtggggactttcagggaactggggggcacctggctgtgagagctgtaggacttgggggtggcaagggtgccaggacaaatggtaggatagccatgggcttggggaagctgatctctgctctttccagctgtcccctctctgggcgtcccagcaagcggcccccattccctggctctgcttcaaaggcacctccatactgggaccacgtggagcagggtagaggtgggactccttcctccagccccctaaaaagagcctgcttaatgcctttctcagactggccctaaaggacacattccttggccagatatccttgccacctaagagacaccactactccacagtgtgtgggctaggataaggcacagcctggggagggggctctgaaggggctgaacagacaggccagcctgacctccagctgctcctgcactgagctggatggccaccctgtgacacccatctgcagagggcccagaaccaaaggtgccagggctgcaggactcagggggagatggtccgacgggaggtctggggagggagcgcacagccagcactggtctgtgtgtggtctggcctggcctcacctgaccaagagaagggctcctgcccacagagaaactttagggccagcccaccctctgcaactaccccagccctggggtcctggggttaggctaggagagtcccagctgcaacctcctgggagcaggagagaaggtgtctgtcagatttaggcctgggaccggaatgcaggaacagagaaactgaggtttggaggcacagggacgcaggctttagtgatcccggcctgaggcagggtcagagggccctgctggtgggcgctggtaggtgggtgaccagggactgttagctacagggagtgtgcttccttgcacctgggaggatgcagccagctctgccctcagactcccgaggcacttcctggccagggacctgaaagctgcatttgcctgtgttttgagagtgaaatgattcagaaacaaggactcaagtggtctctctcgcggagcaggtgtccctgtgcctgaatcactcaccctcccccatacactcacaggttgggacagggcctctctgcgccccaggcttcagccctgccctcctcgctgaatgtcagggacacagggcaggccagggatgggtgagacgagaggtctcctcgggcggggagggggcggggttccgccttagggaggagaggacacggccaagtgaagggccagattgcaggatccctcccactcccatctctggggcttcgggtgtccagacctgactcccgctccccctcctcccccagcctacttctccctgcaggtgatctcggcgcgcagggccttccgcgtgtcgccgccgctcaccaccggcccacccgagttcgagcgcgtctaccgagcccagtgaggcgcggcgggagggcgcggggcggggagcgagccccaggcgggtccgggtcgcaggaccatcccggccggcgcgctcatcccacccgcccaccgcagggtgaactgcagcgagtacttcccgctgttcctcgccacgctctgggtcgccggcatcttctttcatgaaggtcggggtgtggggcaggggcgcacgcgctggacccccgggacccgcgcagggcgctcaccaggcccgtgcgtacctctcgcaggggcggcggccctgtgcggcctggtctacctgttcgcgcgcctccgctacttccagggctacgcgcgctccgcgcagctcaggtgagggccgggcggggagcggggcggggccggggaaagatcgcgggcgggcggggctcctggggagcgggaccgaagctgggggcgggcgacgggccggagcccagcgcctttggggattcggtgggcgagccctggcggcggccagaggaagtccccgtggggccagggttgcggcggggaagaagcgggcctcctcgcgccacctccccgctgaccgccgcccgcaggctggcaccgctgtacgcgagcgcgcgcgccctctggctgctggtggcgctggctgcgctcggcctgctcgcccacttcctcccggccgcgctgcgcgccgcgctcctcggacggctccggacgctgctgccgtgggcctgagaccaaggcccccgggccgacggagccgggaaagaagagccggagcctccagctgccccggggaggggcgctcgcttccgcatcctagtctctatcattaaagttctagtgaccgagacccgggctgcgttctctgggtccgcgggggtggcgcaccgcgggctacggagcctggaggggcccagcccgagtccgggcagcccggggcgggcttcctagtggcggcgtgagagtggctgcgaaggaacgagccctccccctggggcgggactggatccggtcttcacctcctaccccactccctactcagcctcggggtcacaaggccgcccagtcctgccggggttcaccctcctagcgctcagcggtctcctcaccggtccccctcctcaggggccttccctcgactctcagccgccgcagtccctcgtcccctggccttcacagctgacactagatagagcctgtggctctctccccaggtgagggcaggggtttttcttttggtcagcactggatccccctcgttaactgtaggtgttcagggcagccctccgaggtccgcagagctgcgggcaccatgggaacgaagtgagtcagtgacaggcggtctcaaggaaatgtccagaagccttggggatccaggggaggcccacagaaacaaagaagtgacttttagccaagtatgcaggagaaacggaggag

SEQ ID NO: 5571 - DNA, 2010 bp, Homo sapiens
atgcgcggaggaggctttggggaccgggaccgggatcgtgaccgtggaggatttggagcaagaggtggtggtggccttcccccgaagaaatttggtaatcctggggagcgtttgcgtaaaaaaaagtgggatttgagtgagctccccaagtttgagaaaaatttttatgtggaacatccggaagtagcaaggctgacaccatatgaggttgatgagctacgccgaaagaaggagattacagtgagggggggagatgtttgtcctaaacccgtgtttgccttccatcatgctaacttcccacaatatgtaatggatgtgttgatggatcagcactttacagaaccaactccaattcagtgccagggatttccgttggctcttagtggccgggatatggtgggcattgctcagactggctctgggaagacgttggcgtatctcctgcctgcaattgttcatattaaccaccagccatacttggaaaggggagatggcccaatctgtctagttctggctcctaccagagagcttgcccagcaagtacagcaggtggccgatgactatggcaaatgttctagattgaagagtacttgtatttatggaggtgctcctaaaggtccccagattcgagacttggaaagaggtgttgagatctgcatagccactcctggacgtctgatagatttcctggagtcaggaaagacaaatcttcgccgatgtacttaccttgtattggacgaagctgacagaatgcttgatatggggtttgaaccccagatccgtaaaattgttgaccaaatcaggcctgataggcagacactgatgtggagtgcaacctggccaaaagaagtaagacagcttgcagaggatttccttcgtgattacacccagatcaacgtaggcaatctggagttgagtgccaaccacaacatcctccagatagtggatgtctgcatggaaagtgaaaaagaccacaagttgatccaactaatggaagaaataatggctgaaaaggaaaacaaaacaataatatttgtggagacaaagagacgctgtgatgatctgactcgaaggatgcgcagagatggttggccagctatgtgtatccatggagacaagagtcaaccagaaagagattgggtacttaatgagttccgttctggaaaggcacccatccttattgctacagatgtagcctcacgtgggctagatgtggaagatgtcaagtttgtgatcaactatgactatccaaacagctcagaggattatgtgcaccgtattggccgaacagcccgtagcaccaacaagggtaccgcctataccttcttcaccccagggaacctaaaacaggccagagagcttatcaaagtgctggaagaggccaatcaggctatcaatccaaaactgatgcagcttgtggaccacagaggaggcggcggaggcgggggtggtcgttctcgttaccggaccacttcttcagccaacaatcccaatctgatgtatcaggatgagtgtgaccgaaggcttcgaggagtcaaggatggtggccggagagactctgcaagctatcgggatcgtagtgaaaccgatagagctggttatgctaatggcagtggctatggaagtccaaattctgcctttggagcacaagcaggccaatacacctatggtcaaggcacctatggggcagctgcttatggcaccagtagctatacagctcaagaatatggtgctggcacttatggagctagtagcaccacctcaactgggagaagttcacagagctctagccagcagtttagtgggataggccggtctgggcagcagccacagccactgatgtcacaacagtttgcacagcctccaggagctaccaatatgataggttacatggggcagactgcctaccaataccctcctcctcctccccctcctcctccttcacgtaaatgaaaccactcaagtggtagtgactccagcagacttaattacattttaaggaacactgtc

SEQ ID NO: 5572 - DNA, 3394 bp, Homo sapiens
gaattccgacttgttttgtggtctaacatatggtctatgctgcagaatggtccatgtgctgatgagaagaatgtatattctgcagctgttggaagaaagggtctgtaaatgtctgttaggtccatttggtctataatgcagattaagtctgatgtttctttctagatgatctgcccaatactgaaagtgaggcattaaaatcccctgcctttttttgtattaggatctgcctctctctttagctctaatagtgtttgtttatacatgtgagtactttggtattgggtgcatatatatttaaaattgttacatccttttgctgaattgatccctttttcattatgtaatgatcttctttgtccctttttatgttttctgacttagtctattatgaataagtggcgcctgcagacggcccctggaagggctctggtggggctgagcgctctgccgcgggggcgcgggcacagcaggaagcaggtccgcgtgggcgctgggggcatcagctaccggggtggtccgggctgaagagccaggcagccaaggcagccaccccggggggtgggcgactttgggggagttggtgccccgccccccaggccttggcggggtcatggggcccccccattctgggccggggggcgtgcgagtcggggccctgctgctgctgggggttttggggctggtgtctgggctcagcctggagcctgtctactggaactcggcgaataagaggttccaggcagagggtggttatgtgctgtaccctcagatcggggaccggctagacctgctctgcccccgggcccggcctcctggccctcactcctctcctaattatgagttctacaagctgtacctggtagggggtgctcagggccggcgctgtgaggcaccccctgccccaaacctccttctcacttgtgatcgcccagacctggatctccgcttcaccatcaagttccaggagtatagccctaatctctggggccacgagttccgctcgcaccacgattactacatcattgccacatcggatgggacccgggagggcctggagagcctgcagggaggtgtgtgcctaaccagaggcatgaaggtgcttctccgagtgggacaaagtccccgaggaggggctgtcccccgaaaacctgtgtctgaaatgcccatggaaagagaccgaggggcagcccacagcctggagcctgggaaggagaacctgccaggtgaccccaccagcaatgcaacctcccggggtgctgaaggccccctgccccctcccagcatgcctgcagtggctggggcagcaggggggctggcgctgctcttgctgggcgtggcaggggctgggggtgccatgtgttggcggagacggcgggccaagccttcggagagtcgccaccctggtcctggctccttcgggaggggagggtctctgggcctggggggtggaggtgggatgggacctcgggaggctgagcctggggagctagggatagctctgcggggtggcggggctgcagatccccccttctgcccccactatgagaaggtgagtggtgactatgggcatcctgtgtatatcgtgcaggatgggcccccccagagccctccaaacatctactacaaggtatgagggctcctctcacgtggctatcctgaatccagcccttcttggggtgctcctccagtttaattcctggtttgagggacacctctaacatctcggccccctgtgcccccccagccccttcactcctcccggctgctgtcctcgtctccacttttaggattccttaggattcccactgccccacttcctgccctcccgtttggccatgggtgcccccctctgtctcagtgtccctggatcctttttccttggggaggggcacaggctcagcctcctctctgaccatgacccaggcatccttgtccccctcacccacccagagctaggggcgggaacagcccaccttttggttggcaccgccttctttctgcctctcactggttttctcttctctatctcttattctttccctctcttccgtctctaggtctgttcttcttccctagcatcctcctccccacatctcctttcaccctcttggcttcttatcctgtgcctctcccatctcctgggtgggggcatcaaagcatttctccccttagctttcagccccccttctgacctctcataccaaccactcccctcagtctgccaaaaatgggggccttatggggaaggctctgacactccaccccagctcaggccatgggcagcagggctccattctctggcctggcccaggcctctacatacttactccagccatttggggtggttgggtcatgacagctaccatgagaagaagtgtcccgttttgtccagtggccaatagcaagatatgaaccggtcgggacatgtatggacttggtctgatgctgaatgggccacttgggaccggaagtgacttgctccagacaagaggtgaccaggcccggacagaaatggcctgggaagtagcagaagcagtgcagcaggaactggaagtgccttcatccaggacaggaagtagcacttctgaaacaggaagtggtctggctggaactccaagtggcttagtctgggggatcaggaggtgggaggtggatggttcttattctgtggagaagaagggcgggaagaacttcctttcaggaggaagctggaacttactgactgtaagaggttagaggtggaccgagaaggacttttcccagtcttcagtggcacttcccaagatctcccttcccttgtgctctgtgctgattttaggacagctaagatgactgccatgtgctgtggcaggcctaatttgtcttgttctttcctttccatatcccagtataatctctgttaatcaacaggactaccccaagaacccatgtgctctcccgagtaacccagatggctgtcttgttcattccatcctacatttctgactcctttcagactcaacacagttcccttcttagtgaccaaaatggtggcctactggctggtctagctgacagtggtacttagcaaaggccactgtttccatagtgaccagctgatacctcttcctgccctctagtgtgcaattgggtgttgcctcagtttcctcccagctcagttttattagatcaaagctgttgttgggcaccaggttggccacctcaatcaccagccaagatggttgctttgtccaccagaggtcaagttcacctctctggtgctgtagttcccagctccttcctgatttttctaatcgctccttctggggaacaggaagttgatattgccatggtggcggggtatgccgtcacctcagtagttttactgtaaaagggaaatttgaaggaattc

SEQ ID NO: 5573 - DNA, 2303 bp, Homo sapiens; identical to SEQ ID NO: 4846

SEQ ID NO: 5574 - DNA, 990 bp, Homo sapiens; identical to SEQ ID NO: 2040

SEQ ID NO: 5575 - DNA, 2100 bp, Homo sapiens
ctaaagcaaatggttatgagccttagagtttctgaactccaagtactgttgggctacgccgggagaaacaagcacggacgcaaacacgaacttctcacaaaagccctgcatttgctaaaggctggctgtagtcctgctgtgcaaatgaaaattaaggaactctataggcggcggttcccacagaaaatcatgacgcctgcagacttgtccatccccaacgtacattcaagtcctatgccagcaactttgtctccatctaccattccacaactcacttacgatggtcaccctgcatcatcgccattactccctgtttctcttctgggacctaaacatgaactggaactcccacatcttacatcagctcttcacccagtccatccggatataaaacttcaaaaattaccattttatgatttactggatgaactgataaaacccaccagtctagcatcagacaacagtcagcgctttcgagaaacctgttttgcatttgccttgacaccacaacaagtgcagcaaatcagtagttccatggatatttctgggaccaaatgtgacttcacagtacaggtccagttaaggttttgtttatcagaaaccagttgtccacaagaagatcacttcccacccaatctttgtgtgaaagtgaatacaaaaccttgcagccttccaggttaccttccacctacaaaaaatggcgtggaaccaaagcgacccagccgaccaattaatatcacctcacttgtccgactgtccacaacagtaccaaacacgattgttgtttcttggactgcagaaattggaagaaactattccatggcagtatatcttgtaaaacagttgtcctcaacagttcttcttcagaggttacgagcaaagggaataaggaatccggatcattctagagctttaattaaagagaagttgactgcggatccagacagtgaaatagctacaaccagcctaagggtttctctactatgtccacttggtaaaatgcggctgacaattccgtgtcgggcccttacatgttctcatctacaatgttttgacgcaactctttacattcagatgaatgagaaaaaaccaacctgggtttgtcctgtctgtgataagaaggctccatatgaacaccttattattgatggcttgtttatggaaatcctaaagtactgtacagactgtgatgaaatacaatttaaggaggatggcacttgggcaccgatgagatcaaaaaaggaagtacaggaagtttctgcctcttacaatggagtcgatggatgcttgagctccacattggagcatcaggtagcgtctcaccaccagtcctcaaataaaaacaagaaagtagaagtgattgacctaaccatagacagttcatctgatgaagaggaagaagagccatctgccaagaggacctgtccttccctatctcccacatcaccactaaataataaaggcattttaagtcttccacatcaagcatctccagtatcccgcaccccaagccttcctgctgtagacacaagctacattaatacctccctcatccaagactataggcatcctttccacatgacacccatgccttacgacttacaaggattagatttctttcctttcttatcaggagacaatcagcattacaacacctccttgcttgccgctgcagcagcagcagtttcagatgatcaagacctcctacactcgtctcggtttttcccgtatacctcctcacagatgtttcttgatcagttaagtgcaggaggcagtacttctctgccaaccaccaatggaagcagtagtggcagtaacacgagcctggtttcttccaacagcctaagggaaagccatagccacaccgtcacaaacaggagcagcacggacacggcatccatctttggcatcataccagacattatttcattggactgattcccaggccctgctgctcccatccccaccccagatcgaatgaacttggcagaaagaagagaactttgtgctctgttttaccttactctgtttagaaaagtatacaagcgtgttttttttcctttttttggcaaaattaaaagaaatgtacagagaacaaaa

SEQ ID NO: 5576 - DNA, 167343 bp, Homo sapiens; identical to SEQ ID NO: 2740

SEQ ID NO: 5577 - DNA, 210 bp, Homo sapiens
ttccttggatttgtccaaatccaaacccccatttctgtactttgctttctgtcttcaggtgatcaggatgcccttctctcatctgtctacctacagcctggtttgggtcatggcagcagtggtgctgtgcacagcacaaggtaaagaaactcaattcccctgcttggagcccagcaaacacaatttctggggtgaagacatttagccaga

SEQ ID NO: 5578 - DNA, 231 bp, Homo sapiens
actggtgggctggagtcccagggggagattattccaagtaggggctccagaaagtggccagatggtgtgagtggctccagaagactcttctcttctctgtgcaagagccaggaaggctctagaaaggaatgtctgaggaagcatcggagactgggtcccgccatgcctgtgtcatctcctggcttccccggcccttatggctcgttcggaacaccacctggatacggctgc

SEQ ID NO: 5579 - DNA, 719 bp, Homo sapiens
aagatgggattcttcaaacgggcgaagcaccccgaggccaccgtgccccagtaccatgcggtgaagattcctcgggaagaccgacagcagttcaaggaggagaagacgggcaccatcctgaggaacaactggggcagcccccggcgggagggcccggatgcacaccccatcctggctgctgacgggcatcccgagctgggccccgatgggcatccagggccaggcaccgcctaggttcccatgtcccagcctgcgctgtggctgccctccatcccttccccagagatggctccttgggatgaagagggtagagtgggctgctggtgtcacatcaagaatttggcaggatcggcttcctcaggggcacagacctctcccacccacaagaactcctcccacccaacttccccttagagtgctgtgagatgagagtgggtaaatcagggacagggccatggggtagggtgagaagggcaggggtgtcctgatgcaaaggtggggagaaggatcctaatcccttcctctcccattcaccctgtgtaacaggaccccaaggacctgcctccccggaagtgccttaacctagagggtcggggaggaggttgtgtcactgactcaaggctgctccttctctagtttcccctctcatctgaccttagtttgctgccatcagtctagtggtttcgtggtttcgtctatttattaaaaaatcggaaccc

SEQ ID NO: 5580 - DNA, 1459 bp, Homo sapiens
ccgagcttcttaaacacaggccttgggctacggctctgggggtacttgggggggcgggggcaggtctgatgagtaacccctccccccaggttccagaggaagaagcctccacatctgtctgccggcccaagagttccatggcctccacttcccgccgccaacgccgagaacgtcgctttcgtcgttacttgtctgcaggacggctggtccgggcccaggccctcctccagcgacacccaggcctcgatgtagatgctgggcagcccccaccactgcaccgggcctgtgcccgccacgatgcccctgccctgtgcctgctgcttcggctcggggctgaccctgcccaccaggaccgccatggggacacggcactgcatgctgctgcccgccagggcccagatgcctacaccgatttcttcctcccgctgctaagccgctgtccctctgccatgggaataaagaataaggatggggagacccctggccaaattttgggctggggacccccctgggattctgctgaagaggaggaagaagatgatgcctccaaggagcgggaatggagacagaagctccagggtgagctggaggacgagtggcaggaagtcatggggaggtttgaaggtgatgcctcccatgaaacccaggaacctgagtccttctcagcctggtcagatcgcctggcccgggaacatgcccagaagtgccagcagcagcagcgagaagcagagggatcctgtcgacccccacgtgctgagggctccagccagagctggcgacacgaggaggaggagcagcggctcttcagggagcgagcccgggccaaggaggaagagctgcgtgagagccgagccaggagggcgcaggaggctctaggggaccgagaacccaagccaaccagggccgggcccagggaagagcaccccagaggagcggggaggggcagcctctggcgatttggtgatgtgccctggccctgccctgggggaggggacccagaggccatggctgcagccctggtggccaggggcccccctttggaggaacagggggctctgaggaggtacttgagggtccagcaggtccgctggcaccctgaccgcttcctgcagcgattccgaagccagattgagacctgggagctgggccgtgtgatgggagcagtgacagccctttctcaggccctgaatcgccatgcagaggccctcaagtgaccctagggaagaagcaagaaacttcggggctgcagcctcaggatgaggcagaaggaagggtaagggaaaggatggggaccacaaggaagagccaggtgctgctcagcagaggatatgggtgggagcgaaagttgtaacaagtgggggtggggggtgcgggccgccaccactgctccttgactctgccgtttcctaataagacctggttccacatctcaaaaaaaaaaaaaaaaaaaaaaaaaaaa

SEQ ID NO: 5581 - DNA, 3922 bp, Homo sapiens
aagcttgctcttgcagccaaaagactaattgcaaaggcatcttctcagtgaagggggcggggtgggctagggctgagtggaaatggtgagagagattattgtagaaaatatctcttccgggaacttagggcaaagagttttattttcaggaatcacatccctgtctcccccaacctcagaccaggcccccaatctcctccccacaagaaaaagcaaaggcagtctgaaaacctgttgccaaaggaagggaacacttctgaaggaggaagttgagagtcttaggccaggtcttgaaggagggggtatcaattaagcagagactgattggaaggggacctaacgtgcctatgatagactcctttctgaggtttacctgtttttgtcgcgggcggtggcggggcgggtgcggtaatctagagaggtctgggttgtgtgagatattttgagttgaagaatctatttgactagtaaaaaagttgaactttaaagtggtagctttggggacagaggacatgggggttgcattgcaggagtcagcatggagcagggtgcttgtcacacagtttggatcttgtggtttcttacgcatggggccaaaataaacccaggtgaatggcctatgggagggagagagggaagggagcttgctagagccgaggtagagatgagttctttgagaaagagcgggcgtttgtgattgtgtagggggctgcccatagtggacatcctggtggatgtcctctgtccttaccatccttctcttctctctccagggtaacaagatgctcaactatagtgctcccagtgcagggggttgcctgctggacagaaaggcagtgggcacccctgctggtgggggcttccctcggaggcactcagtcaccctgcccagctccaagttccaccagaaccagctcctcagcagcctcaagggtgagccagcccccgctctgagctcgcgagacagccgcttccgagaccgctccttctcggaagggggcgagcggctgctgcccacccagaagcagcccgggggcggccaggtcaactccagccgctacaagacggagctgtgccgcccctttgaggaaaacggtgcctgtaagtacggggacaagtgccagttcgcacacggcatccacgagctccgcagcctgacccgccaccccaagtacaagacggagctgtgccgcaccttccacaccatcggcttttgcccctacgggccccgctgccacttcatccacaacgctgaagagcgccgtgccctggccggggcccgggacctctccgctgaccgtccccgcctccagcatagctttagctttgctgggtttcccagtgccgctgccaccgccgctgccaccgggctgctggacagccccacgtccatcaccccaccccctattctgagcgccgatgacctcctgggctcacctaccctgcccgatggcaccaataacccttttgccttctccagccaggagctggcaagcctctttgcccctagcatggggctgcccgggggtggctccccgaccaccttcctcttccggcccatgtccgagtcccctcacatgtttgactctccccccagccctcaggattctctctcggaccaggagggctacctgagcagctccagcagcagccacagtggctcagactccccgaccttggacaactcaagacgcctgcccatcttcagcagactttccatctcagatgactaagccagggtagggagggacctcctgcctactccagcccctaccctgcacccacatcccataccctcttctccctacccatcccattccccacaggccctacattaacaaggttaagctcaacccctttcccccagcacctcagaatgtgccctccctctccccctcataaccccacctaacataaggacaagtcaatttgtcagtagcttcttctggcttgaaaccccctccctggattttatagcccacttaccatgcataacagacaagtcccatattttgtcagtagatgcctttttttttcgcttaagccttaagtgccaaatcacaagagaaaaagcagtaacagtttacagaagcaacttagtgccttgtaatctaactttgtcactgtgactacattacctcttcagcgccagagggcacccgtgggcctcccggagcctctgcccatggcggggtggagacccggaaccagcagccccctccactggcgacacaactgcaccttccctcatttcagtctcccgcacacttattcctcctcccctcttcccggtggcacctctccacctgtaccgccccccaccccccccacccctgccccttggaagagttgttgccagaccagggttttgggggaaacctgtcttgacattcaaaacctttttcttcccgatctgaacccctgttgactaatcttgcctgggtttgtgtaggtctgcaggaaggaaggctgaaaaagcggacgaagattttgacttaagtggactttgtgatttaattttttcttttttttaagtggggaggaaggggaagctagatggactaggagagacttgattttggtgctaaagttccccagttcatatgtgacatctttttaaaaaaaataacaacaaaaaaaaaatgagagaaaagctaaaaaaaaaaaagtaaggggtgagcagttaatggtattcattccacatacaatatctgtgtaaaacgatttcctgtagaagtagctttaatggtttttgctctagaataccgtaggtctatccttagagcactcacgccatgctttcttccctgggttttaaacttcatataactttcagaaattggagagcaaaaattttgcttgtcactgcacatcaatataaaaaagcttatttaacttatcaaaacgtatttattgccaaactatgcttttttttgttaattttgttcatatttatcgggatgacaaatccatagaatatattcttttatgttaaattatgatcttcatattaatcttaaaattttgtgacgtgtctttttcctttttttccacagttttaatatattattcttcaacgacattttttgtaactttacacttttttggttattttattttaaaaaaatgaaaaattaatttaaaaaaatgcaaaaaactgttggattatttattttagaaattcccccctttgtgttggactgcaaattgagtttctttctctttaggcctttcacaactaggactgagaatgtatgtaaaagttctgtgacagtacagaaggaaaacaactttttatgtatagcttctaaaaggggaaaaaaaaaaaaaagagaaaccctttgacttccacgtgcccatctcaagacattccactcacagatttgaggttctggattccaggtctggagttttccaatgttaatgtaaacagaactggcacacacacattaagatgaatgtaattattattcctcttgctggtcactaccgtcgctttctatttctctttctttgtgtgaatttatttaaaagaaaaaaaactttttgtaacgactatttgcagtttaaaaatcaataaaccccgttttttcaagaaacattgatggtggagctggttttacttggttttggtttgactttgccagtaaggttctccccttgtataccttgcaagtcctggggagggggaggcggagagagagggctgtggctgtgggtggcggcatctctcatccctataagctaagcctatagctcccttccttgatgctggcagtttgctgcacttagaggggacggggtggaggttttctgcaaaggagcctgtacttcctgctgtattacttctgaaaagactgtgcagtgtgttagttgttggctgaatagcagcgggcccagccttgccgacacttgtgtggcc

SEQ ID NO: 5582 - DNA, 2847 bp, Homo sapiens
ttgggggttgggagaaaggtggcggtgctttcggagggaataaaatggaaggagaatcaagcagatttgaaatccacactccagtttctgacaagaaaaagaaaaagtgttctatacataaggaaagacctcagaaacattcccacgaaattttcagagactcctccctggtgaatgaacagtctcaaataactaggaggaaaaagaggaaaaaagatttccagcatctcatttcttctcctttgaaaaaatccagaatctgtgatgagactgcaaatgccacttccacactcaaaaagagaaaaaagagaagatatagtgctttggaggtggacgaggaagcaggtgttacagttgtccttgtggataaagaaaatattaacaacacaccaaagcattttagaaaggatgttgatgttgtttgtgttgatatgagcatagaacagaagttaccaagaaagcctaaaacagacaaatttcaggtacttgctaagtcacatgcacataaatcagaagccctgcacagtaaagttagggagaaaaagaataaaaagcatcagaggaaagctgcatcctgggagagccagcgggcaagggacaccctgcctcagtcagaatcccaccaggaggagtcctggctttctgtgggtccagggggtgaaattacagaactaccagcatctgctcataaaaacaagtctaagaaaaaaaagaaaaagtccagtaaccgggaatatgagacactggccatgcctgaaggatcgcaagcaggcagagaggccgggactgatatgcaggaatcccagcctactgtgggcttggatgatgaaactccacaactactaggacctactcacaaaaaaaagtctaagaaaaaaaagaagaaaaagtccaatcaccaggaatttgaggcattggccatgcctgaaggatcacaagtgggcagtgaggttggggctgatatgcaggaatcccggcctgctgtgggcctgcatggtgaaactgcaggaataccagcacctgcttataaaaacaagtctaagaaaaaaaagaaaaagtccaatcaccaggaatttgaggcagtggccatgcctgagagcctcgagagtgcataccctgaaggatcacaggtgggcagtgaggttgggactgtggaaggcagtacagctcttaaagggttcaaggaatccaacagtacaaagaagaagtctaagaaaaggaagcttacgtctgtcaaaagggcacgagtgtctggtgatgatttttcagtgcccagtaagaactctgagagcacactctttgattcagtagaaggtgatggcgccatgatggaagaaggtgtgaaatctaggccccgacaaaagaaaacccaggcctgtttggcaagcaagcacgtgcaagaggcgccaaggttagaacctgcaaatgaagaacacaatgtggaaacagctgaagattccgaaataagatacttatctgcagattcaggagatgccgatgattcagatgcggatttgggttctgccgtgaaacagcttcaggagttcattcctaacatcaaggacagggccaccagcacaatcaagcggatgtaccgggacgacttggaacggtttaaggaatttaaagcacaaggtgtcgctattaaatttggcaagttttctgtaaaggaaaataagcagttagagaaaaatgtggaagactttctagccctgacaggcattgagagtgcagacaagctcctgtacacggacagatatcctgaggaaaaatctgtgatcaccaacttaaaaaggagatactcgtttagattacacattggtaggaacattgcccggccctggaaacttatatactatcgagcaaagaagatgttcgatgtcaacaattacaaaggcaggtatagcgaaggagatactgagaagttaaagatgtaccattctctccttgggaatgactggaagacgattggtgagatggtggcccgacgtagcctctccgtggccctcaagttctcacagatcagcagtcaaagaaatcgtggtgcttggagtaagtctgaaacccggaaactaatcaaggctgtcgaagaagtgattctgaagaagatgtctccccaggagttaaaagaggtggattccaaactccaagaaaatcctgaaagttgcctatcaattgttcgggaaaaactctacaagggcatatcttgggtagaagtagaagctaaagtgcaaaccagaaattggatgcagtgtaaaagtaagtggacagaaattctaaccaagaggatgactaatggtcggcgtatatactatggcatgaatgccctgcgggccaaggtcagccttattgaaaggttgtatgaaataaatgtggaagatactaatgaaatagactgggaagatcttgctagtgccataggtgatgttcctccatcttacgttcaaactaaattttctaggctgaaagctgtctatgttccattttggcagaaaaagacttttccagagatcatcgactacctttatgagacgactctacctttgctgaaggaaaagttagaaaaaatgatggagaaaaaaggcactaaaatccagactcctgcagcacccaagcaagttttcccatttcgagacatcttttattatgaagacgatagtgaaggaggaggacatagaaaaagaaagcgaaggggaattccgtaaagcctagaatcaaaagaaaacaaaacccatagtcaagccacagacaagcccagaataatatggccaggggatcaatccgattagccgactggcccagatccagcaggcaaaaaaggagaaggagccagagtacacgctcctc

SEQ ID NO: 5583 - DNA, 729 bp, Homo sapiens
gaattcgggagcatggacctcagtcttctctgggtacttatgcccctagtcaccatggcctggggccagtatggcgattatggatacccataccagcagtatcatgactacagcgatgatgggtgggtgaatttgaatcggcaaggcttcagctaccagtgtccccaggggcaggtgatagtggccgtgaggagcatcttcagtaagaaggaaggttctgacagacaatggaactacgcctgcatgcccacgccacagagcctcggggaacccacggagtgctggtgggaggagatcaacagggctggcatggaatggtaccagacgtgctccaacaatgggctggtggcaggattccagagccgctacttcgagtcagtgctggatcgggagtggcagttttactgttgtcgctacagcaagaggtgcccatattcctgctggctaacaacagaatatccaggtcactatggtgaggaaatggacatgatttcctacaattatgattactatatccgaggagcaacaaccactttctctgcagtggaaagggatcgccagtggaagttcataatgtgccggatgactgaatacgactgtgaatttgcaaatgtttagatttgccacataccaaatctgggtgaaaggaaaggggccctccagctttccactgcagagaaagtggttgttgctcctcggtatatgtaatcataattgtagatcgaattc

SEQ ID NO: 5584 - DNA, 2393 bp, Homo sapiens
gacgaggaggcggcgccgctgctgcggaggacggcgcggcccggcggggggacgccgctgctgaacggggctgggcccggggctgcgcgccagtcaccacgttctgcgcttttccgagtcggacatatgagcagcgtggagctggatgatgaacttttggacccggatatggaccctccacatcccttccccaaggagatcccacacaacgagaagctcctgtccctcaagtatgagagcttggactatgacaacagtgagaaccagctgttcctggaggaggagcggcggatcaatcacacggccttccggacggtggagatcaagcgctgggtcatctgcgccctcattgggatcctcacgggcctcgtggcctgcttcattgacatcgtggtggaaaacctggctggcctcaagtacagggtcatcaagggcaatatcgacaagttcacagagaagggcggactgtccttctccctgttgctgtgggccacgctgaacgccgccttcgtgctcgtgggctctgtgattgtggctttcatagagccggtggctgctggcagcggaatcccccagatcaagtgcttcctcaacggggtgaagatcccccacgtggtgcggctcaagacgttggtgatcaaagtgtccggtgtgatcctgtccgtggtcgggggcctggccgtgggaaaggaagggccgatgatccactcaggttcagtgattgccgccgggatctctcagggaaggtcaagctcactgaaacgagatttcaagatcttcgagtacctccgcagagacacagagaagcgggacttcgtctccgcaggggctgcggccggagtgtcagcggcgtttggagcccccgtgggtggggtcctgttcagcttggaggagggtgcgtccttctggaaccagttcctgacctggaggatcttctttgcttccatgatctccacgttcaccctgaattttgttctgagcatttaccacgggaacatgtgggacctgtccagcccaggcctcatcaacttcggaaggtttgactcggagaaaatggcctacacgatccacgagatcccggtcttcatcgccatgggcgtggtgggcggtgtgcttggagcagtgttcaatgccttgaactactggctgaccatgtttcgaatcaggtacatccaccggccctgcctgcaggtgattgaggccgtgctggtggccgccgtcacggccacagttgccttcgtgctgatctactcgtcgcgggattgccagcccctgcaggggggctccatgtcctacccgctgcagctcttttgtgcagatggcgagtacaactccatggctgcggccttcttcaacaccccggagaagagcgtggtgagcctcttccacgacccgccaggctcctacaaccccctgaccctcggcctgttcacgctggtctacttcttcctggcctgctggacctacgggctcacggtgtctgccggggtcttcatcccgtccctgctcatcggggctgcctggggccggctctttgggatctccctgtcctacctcacgggggcggcgatctgggcggaccccggcaaatacgccctgatgggagctgctgcccagctgggcgggattgtgcggatgacactgagcctgaccgtcatcatgatggaggccaccagcaacgtgacctacggcttccccatcatgctggtgctcatgaccgccaagatcgtgggcgacgtcttcattgagggcctgtacgacatgcacattcagctgcagagtgtgcccttcctgcactgggaggccccggtcacctcacactcactcactgccagggaggtgatgagcacaccagtgacctgcctgaggcggcgtgagaaggtcggcgtcattgtggacgtgctgagcgacacggcgtccaatcacaacggcttccccgtggtggagcatgccgatgacacccagcctgcccggctccagggcctgatcctgcgctcccagctcatcgttctcctaaagcacaaggtgtttgtggagcggtccaacctgggcctggtacagcggcgcctgaggctgaaggacttccgagacgcctacccgcgcttcccacccatccagtccatccacgtgtcccaggacgagcgggagtgcaccatggacctctccgagttcatgaacccctccccctacacggtgccccaggaggcgtcgctcccacgggtgttcaagctgttccgggccctgggcctgcggcacctggtggtggtggacaaccgcaatcaggttgtcgggttggtgaccaggaaggacctcgccaggtaccgcctgggaaagagaggcttggaggagctctcgctggcccagacgtgaggcccagccctgcccataatggg

SEQ ID NO: 5585 - DNA, 14255 bp, Homo sapiens
gcggcggcggcggcgggaagcagcggggctggggttccagggggagcggccgccgcctcagcagcctcctcgtcgtccgcctcgtcttcgtcttcgtcatcgtcctcagcctcttcagggccggccctgctccgggtgggcccgggcttcgacgcggcgctgcaggtctcggccgccatcggcaccaacctgcgccggttccgggccgtgtttggggagagcggcgggggaggcggcagcggagaggatgagcaattcttaggttttggctcagatgaagaagtcagagtgcgaagtcccacaaggtctccttcagttaaaactagtcctcgaaaacctcgtgggagacctagaagtggctctgaccgaaattcagctatcctctcagatccatctgtgttttcccctctaaataaatcagagaccaaatctggagataagatcaagaagaaagattctaaaagtatagaaaagaagagaggaagacctcccaccttccctggagtaaaaatcaaaataacacatggaaaggacatttcagagttaccaaagggaaacaaagaagatagcctgaaaaaaattaaaaggacaccttctgctacgtttcagcaagccacaaagattaaaaaattaagagcaggtaaactctctcctctcaagtctaagtttaagacagggaagcttcaaataggaaggaagggggtacaaattgtacgacggagaggaaggcctccatcaacagaaaggataaagaccccttcgggtctcctcattaattctgaactggaaaagccccagaaagtccggaaagacaaggaaggaacacctccacttacaaaagaagataagacagttgtcagacaaagccctcgaaggattaagccagttaggattattccttcttcaaaaaggacagatgcaaccattgctaagcaactcttacagagggcaaaaaagggggctcaaaagaaaattgaaaaagaagcagctcagctgcagggaagaaaggtgaagacacaggtcaaaaatattcgacagttcatcatgcctgttgtcagtgctatctcctcgcggatcattaagacccctcggcggtttatagaggatgaggattatgaccctccaattaaaattgcccgattagagtctacaccgaatagtagattcagtgccccgtcctgtggatcttctgaaaaatcaagtgcagcttctcagcactcctctcaaatgtcttcagactcctctcgatctagtagccccagtgttgatacctccacagactctcaggcttctgaggagattcaggtacttcctgaggagcggagcgatacccctgaagttcatcctccactgcccatttcccagtccccagaaaatgagagtaatgataggagaagcagaaggtattcagtgtcggagagaagttttggatctagaacgacgaaaaaattatcaactctacaaagtgccccccagcaggagacctcctcgtctccacctccacctctgctgactccaccgccaccactgcagccagcctccagtatctctgaccacacaccttggcttatgcctccaacaatccccttagcatcaccatttttgcctgcttccactgctcctatgcaagggaagcgaaaatctattttgcgagaaccgacatttaggtggacttctttaaagcattctaggtcagagccacaatacttttcctcagcaaagtatgccaaagaaggtcttattcgcaaaccaatatttgataatttccgaccccctccactaactcccgaggacgttggctttgcatctggtttttctgcatctggtaccgctgcttcagcccgattgttttcgccactccattctggaacaaggtttgatatgcacaaaaggagccctcttctgagagctccaagatttactccaagtgaggctcactctagaatatttgagtctgtaaccttgcctagtaatcgaacttctgctggaacatcttcttcaggagtatccaatagaaaaaggaaaagaaaagtgtttagtcctattcgatctgaaccaagatctccttctcactccatgaggacaagaagtggaaggcttagtagttctgagctctcacctctcacccccccgtcttctgtctcttcctcgttaagcatttctgttagtcctcttgccactagtgccttaaacccaacttttacttttccttctcattccctgactcagtctggggaatctgcagagaaaaatcagagaccaaggaagcagactagtgctccggcagagccattttcatcaagtagtcctactcctctcttcccttggtttaccccaggctctcagactgaaagagggagaaataaagacaaggcccccgaggagctgtccaaagatcgagatgctgacaagagcgtggagaaggacaagagtagagagagagaccgggagagagaaaaggagaataagcgggagtcaaggaaagagaaaaggaaaaagggatcagaaattcagagtagttctgctttgtatcctgtgggtagggtttccaaagagaaggttgttggtgaagatgttgccacttcatcttctgccaaaaaagcaacagggcggaagaagtcttcatcacatgattctgggactgatattacttctgtgactcttggggatacaacagctgtcaaaaccaaaatacttataaagaaagggagaggaaatctggaaaaaaccaacttggacctcggcccaactgccccatccctggagaaggagaaaaccctctgcctttccactccttcatctagcactgttaaacattccacttcctccataggctccatgttggctcaggcagacaagcttccaatgactgacaagagggttgccagcctcctaaaaaaggccaaagctcagctctgcaagattgagaagagtaagagtcttaaacaaaccgaccagcccaaagcacagggtcaagaaagtgactcatcagagacctctgtgcgaggaccccggattaaacatgtctgcagaagagcagctgttgcccttggccgaaaacgagctgtgtttcctgatgacatgcccaccctgagtgccttaccatgggaagaacgagaaaagattttgtcttccatggggaatgatgacaagtcatcaattgctggctcagaagatgctgaacctcttgctccacccatcaaaccaattaaacctgtcactagaaacaaggcaccccaggaacctccagtaaagaaaggacgtcgatcgaggcggtgtgggcagtgtcccggctgccaggtgcctgaggactgtggtgtttgtactaattgcttagataagcccaagtttggtggtcgcaatataaagaagcagtgctgcaagatgagaaaatgtcagaatctacaatggatgccttccaaagcctacctgcagaagcaagctaaagctgtgaaaaagaaagagaaaaagtctaagaccagtgaaaagaaagacagcaaagagagcagtgttgtgaagaacgtggtggactctagtcagaaacctaccccatcagcaagagaggatcctgccccaaagaaaagcagtagtgagcctcctccacgaaagcccgtcgaggaaaagagtgaagaagggaatgtctcggcccctgggcctgaatccaaacaggccaccactccagcttccaggaagtcaagcaagcaggtctcccagccagcactggtcatcccgcctcagccacctactacaggaccgccaagaaaagaagttcccaaaaccactcctagtgagcccaagaaaaagcagcctccaccaccagaatcaggtccagagcagagcaaacagaaaaaagtggctccccgcccaagtatccctgtaaaacaaaaaccaaaagaaaaggaaaaaccacctccggtcaataagcaggagaatgcaggcactttgaacatcctcagcactctctccaatggcaatagttctaagcaaaaaattccagcagatggagtccacaggatcagagtggactttaaggaggattgtgaagcagaaaatgtgtgggagatgggaggcttaggaatcttgacttctgttcctataacacccagggtggtttgctttctctgtgccagtagtgggcatgtagagtttgtgtattgccaagtctgttgtgagcccttccacaagttttgtttagaggagaacgagcgccctctggaggaccagctggaaaattggtgttgtcgtcgttgcaaattctgtcacgtttgtggaaggcaacatcaggctacaaagcagctgctggagtgtaataagtgccgaaacagctatcaccctgagtgcctgggaccaaactaccccaccaaacccacaaagaagaagaaagtctggatctgtaccaagtgtgttcgctgtaagagctgtggatccacaactccaggcaaagggtgggatgcacagtggtctcatgatttctcactgtgtcatgattgcgccaagctctttgctaaaggaaacttctgccctctctgtgacaaatgttatgatgatgatgactatgagagtaagatgatgcaatgtggaaagtgtgatcgctgggtccattccaaatgtgagaatctttcaggtacagaagatgagatgtatgagattctatctaatctgccagaaagtgtggcctacacttgtgtgaactgtactgagcggcaccctgcagagtggcgactggcccttgaaaaagagctgcagatttctctgaagcaagttctgacagctttgttgaattctcggactaccagccatttgctacgctaccggcaggctgccaagcctccagacttaaatcccgagacagaggagagtataccttcccgcagctcccccgaaggacctgatccaccagttcttactgaggtcagcaaacaggatgatcagcagcctttagatctagaaggagtcaagaggaagatggaccaagggaattacacatctgtgttggagttcagtgatgatattgtgaagatcattcaagcagccattaattcagatggaggacagccagaaattaaaaaagccaacagcatggtcaagtccttcttcattcggcaaatggaacgtgtttttccatggttcagtgtcaaaaagtccaggttttgggagccaaataaagtatcaagcaacagtgggatgttaccaaacgcagtgcttccaccttcacttgaccataattatgctcagtggcaggagcgagaggaaaacagccacactgagcagcctcctttaatgaagaaaatcattccagctcccaaacccaaaggtcctggagaaccagactcaccaactcctctgcatcctcctacaccaccaattttgagtactgataggagtcgagaagacagtccagagctgaacccacccccaggcatagaagacaatagacagtgtgcgttatgtttgacttatggtgatgacagtgctaatgatgctggtcgtttactatatattggccaaaatgagtggacacatgtaaattgtgctttgtggtcagcggaagtgtttgaagatgatgacggatcactaaagaatgtgcatatggctgtgatcaggggcaagcagctgagatgtgaattctgccaaaagccaggagccaccgtgggttgctgtctcacatcctgcaccagcaactatcacttcatgtgttcccgagccaagaactgtgtctttctggatgataaaaaagtatattgccaacgacatcgggatttgatcaaaggcgaagtggttcctgagaatggatttgaagttttcagaagagtgtttgtggactttgaaggaatcagcttgagaaggaagtttctcaatggcttggaaccagaaaatatccacatgatgattgggtctatgacaatcgactgcttaggaattctaaatgatctctccgactgtgaagataagctctttcctattggatatcagtgttccagggtatactggagcaccacagatgctcgcaagcgctgtgtatatacatgcaagatagtggagtgccgtcctccagtcgtagagccggatatcaacagcactgttgaacatgatgaaaacaggaccattgcccatagtccaacatcttttacagaaagttcatcaaaagagagtcaaaacacagctgaaattataagtcctccatcaccagaccgacctcctcattcacaaacctctggctcctgttattatcatgtcatctcaaaggtccccaggattcgaacacccagttattctccaacacagagatcccctggctgtcgaccgttgccttctgcaggaagtcctaccccaaccactcatgaaatagtcacagtaggtgatcctttactctcctctggacttcgaagcattggctccaggcgtcacagtacctcttccttatcaccccagcggtccaaactccggataatgtctccaatgagaactgggaatacttactctaggaataatgtttcctcagtctccaccaccgggaccgctactgatcttgaatcaagtgccaaagtagttgatcatgtcttagggccactgaattcaagtactagtttagggcaaaacacttccacctcttcaaatttgcaaaggacagtggttactgtaggcaataaaaacagtcacttggatggatcttcatcttcagaaatgaagcagtccagtgcttcagacttggtgtccaagagctcctctttaaagggagagaagaccaaagtgctgagttccaagagctcagagggatctgcacataatgtggcttaccctggaattcctaaactggccccacaggttcataacacaacatctagagaactgaatgttagtaaaatcggctcctttgctgaaccctcttcagtgtcgttttcttctaaagaggccctctccttcccacacctccatttgagagggcaaaggaatgatcgagaccaacacacagattctacccaatcagcaaactcctctccagatgaagatactgaagtcaaaaccttgaagctatctggaatgagcaacagatcatccattatcaacgaacatatgggatctagttccagagataggagacagaaagggaaaaaatcctgtaaagaaactttcaaagaaaagcattccagtaaatcttttttggaacctggtcaggtgacaactggtgaggaaggaaacttgaagccagagtttatggatgaggttttgactcctgagtatatgggccaacgaccatgtaacaatgtttcttctgataagattggtgataaaggcctttctatgccaggagtccccaaagctccacccatgcaagtagaaggatctgccaaggaattacaggcaccacggaaacgcacagtcaaagtgacactgacacctctaaaaatggaaaatgagagtcaatccaaaaatgccctgaaagaaagtagtcctgcttcccctttgcaaatagagtcaacatctcccacagaaccaatttcagcctctgaaaatccaggagatggtccagtggcccaaccaagccccaataatacctcatgccaggattctcaaagtaacaactatcagaatcttccagtacaggacagaaacctaatgcttccagatggccccaaacctcaggaggatggctcttttaaaaggaggtatccccgtcgcagtgcccgtgcacgttctaacatgttttttgggcttaccccactctatggagtaagatcctatggtgaagaagacattccattctacagcagctcaactgggaagaagcgaggcaagagatcagctgaaggacaggtggatggggccgatgacttaagcacttcagatgaagacgacttatactattacaacttcactagaacagtgatttcttcaggtggagaggaacgactggcatcccataatttatttcgggaggaggaacagtgtgatcttccaaaaatctcacagttggatggtgttgatgatgggacagagagtgatactagtgtcacagccacaacaaggaaaagcagccagattccaaaaagaaatggtaaagaaaatggaacagagaacttaaagattgatagacctgaagatgctggggagaaagaacatgtcactaagagttctgttggccacaaaaatgagccaaagatggataactgccattctgtaagcagagttaaaacacagggacaagattccttggaagctcagctcagctcattggagtcaagccgcagagtccacacaagtaccccctccgacaaaaatttactggacacctataatactgagctcctgaaatcagattcagacaataacaacagtgatgactgtgggaatatcctgccttcagacattatggactttgtactaaagaatactccatccatgcaggctttgggtgagagcccagagtcatcttcatcagaactcctgaatcttggtgaaggattgggtcttgacagtaatcgtgaaaaagacatgggtctttttgaagtattttctcagcagctgcctacaacagaacctgtggatagtagtgtctcttcctctatctcagcagaggaacagtttgagttgcctctagagctaccatctgatctgtctgtcttgaccacccggagtcccactgtccccagccagaatcccagtagactagctgttatctcagactcaggggagaagagagtaaccatcacagaaaaatctgtagcctcctctgaaagtgacccagcactgctgagcccaggagtagatccaactcctgaaggccacatgactcctgatcattttatccaaggacacatggatgcagaccacatctctagccctccttgtggttcagtagagcaaggtcatggcaacaatcaggatttaactaggaacagtagcacccctggccttcaggtacctgtttccccaactgttcccatccagaaccagaagtatgtgcccaattctactgatagtcctggcccgtctcagatttccaatgcagctgtccagaccactccaccccacctgaagccagccactgagaaactcatagttgttaaccagaacatgcagccactttatgttctccaaactcttccaaatggagtgacccaaaaaatccaattgacctcttctgttagttctacacccagtgtgatggagacaaatacttcagtattgggacccatgggaggtggtctcacccttaccacaggactaaatccaagcttgccaacttctcaatctttgttcccttctgctagcaaaggattgctacccatgtctcatcaccagcacttacattccttccctgcagctactcaaagtagtttcccaccaaacatcagcaatcctccttcaggcctgcttattggggttcagcctcctccggatccccaacttttggtttcagaatccagccagaggacagacctcagtaccacagtagccactccatcctctggactcaagaaaagacccatatctcgtctacagacccgaaagaataaaaaacttgctccctctagtaccccttcaaacattgccccttctgatgtggtttctaatatgacattgattaacttcacaccctcccagcttcctaatcatccaagtctgttagatttggggtcacttaatacttcatctcaccgaactgtccccaacatcataaaaagatctaaatctagcatcatgtattttgaaccggcacccctgttaccacagagtgtgggaggaactgctgccacagcggcaggcacatcaacaataagccaggatactagccacctcacatcagggtctgtgtctggcttggcatccagttcctctgtcttgaatgttgtatccatgcaaactaccacaacccctacaagtagtgcgtcagttccaggacacgtcaccttaaccaacccaaggttgcttggtaccccagatattggctcaataagcaatcttttaatcaaagctagccagcagagcctggggattcaggaccagcctgtggctttaccgccaagttcaggaatgtttccacaactggggacatcacagaccccctctactgctgcaataacagcggcatctagcatctgtgtgctcccctccactcagactacgggcataacagccgcttcaccttctggggaagcagacgaacactatcagcttcagcatgtgaaccagctccttgccagcaaaactgggattcattcttcccagcgtgatcttgattctgcttcagggccccaggtatccaactttacccagacggtagacgctcctaatagcatgggactggagcagaacaaggctttatcctcagctgtgcaagccagccccacctctcctgggggttctccatcctctccatcttctggacagcggtcagcaagcccttcagtgccgggtcccactaaacccaaaccaaaaaccaaacggtttcagctgcctctagacaaagggaatggcaagaagcacaatgtttcccatttgcggaccagttcttctgaagcacacattccagaccaagaaacgacatccctgacctcaggcacagggactccaggagcagaggctgagcagcaggatacagctagcgtggagcagtcctcccagaaggagtgtgggcaacctgcagggcaagtcgctgttcttccggaagttcaggtgacccaaaatccagcaaatgaacaagaaagtgcagaacctaaaacagtggaagaagaggaaagtaatttcagctccccactgatgctttggcttcagcaagaacaaaagcggaaggaaagcattactgagaaaaaacccaagaaaggacttgtttttgaaatttccagtgatgatggctttcagatctgtgcagaaagtattgaagatgcctggaagtcattgacagataaagtccaggaagctcgatcaaatgcccgcctaaagcagctctcatttgcaggtgttaacggtttgaggatgctggggattctccatgatgcagttgtgttcctcattgagcagctgtctggtgccaagcactgtcgaaattacaaattccgtttccacaagccagaggaggccaatgaaccccccttgaaccctcacggctcagccagggctgaagtccacctcaggaagtcagcatttgacatgtttaacttcctggcttctaaacatcgtcagcctcctgaatacaaccccaatgatgaagaagaggaggaggtacagctgaagtcagctcggagggcaactagcatggatctgccaatgcccatgcgcttccggcacttaaaaaagacttctaaggaggcagttggtgtctacaggtctcccatccatggccggggtcttttctgtaagagaaacattgatgcaggtgagatggtgattgagtatgccggcaacgtcatccgctccatccagactgacaagcgggaaaagtattacgacagcaagggcattggttgctatatgttccgaattgatgactcagaggtagtggatgccaccatgcatggaaatgctgcacgcttcatcaatcactcgtgtgagcctaactgctattctcgggtcatcaatattgatgggcagaagcacattgtcatctttgccatgcgtaagatctaccgaggagaggaactcacttacgactataagttccccattgaggatgccagcaacaagctgccctgcaactgtggcgccaagaaatgccggaagttcctaaactaaagctgctcttctcccccagtgttggagtgcaaggaggcggggccatccaaagcaacgctgaaggccttttccagcagctgggagctcccggattgcgtggcacagctgaggggcctctgtgatggctgagctctcttatgtcctatactcacatcagacatgtgatcatagtcccagagacagagttgaggtctcgaagaaaagatccatgatcggctttctcctggggcccctccaattgtttactgttagaaagtgggaatggggtccctagcagacttgcctggaaggagcctattatagagggttggttatgttgggagattgggcctgaatttctccacagaaataagttgccatcctcaggttggccctttcccaagcactgtaagtgagtgggtcagccaaagccccaaatggagggttggttagattcctgacagtttgccagccagccgccacctacagcgtctgtcgaacaaacagaggtctggtggttttccctactgtcctcccactcgagagttcacttctggttgggagacaggattcctagcacctccggtgtcaaaaggctgtcatggggttgtgccaattaattaccaaacattgagcctgcaggctttgagtgggagtgttgcccccaggagccttatctcagccaattacctttcttgacagtaggagcggcttccctctcccattccctcttcactcccttttcttcctttcccctgtcttcatgccactgctttcccatgcttctttcggttgtaggggagactgactgcctgctcaaggacactccctgctgggcataggatgtgcctgcaaaaagttccctgagcctgtaagcactccaggtggggaagtggacaggagccattggtcataaccagacagaatttggaaacattttcataaagctccatggagagttttaaagaaacatatgtagcatgattttgtaggagaggaaaaagattatttaaataggatttaaatcatgcaacaacgagagtatcacagccaggatgacccttgggtcccattcctaagacatggttactttattttccccttgttaagacataggaagacttaatttttaaacggtcagtgtccagttgaaggcagaacactaatcagatttcaaggcccacaacttggggactagaccaccttatgttgagggaactctgccacctgcgtgcaacccacagctaaagtaaattcaatgacactactgccctgattactccttaggatgtggtcaaaacagcatcaaatgtttcttctcttcctttccccaagacagagtcctgaacctgttaaattaagtcattggattttactctgttctgtttacagtttactatttaaggttttataaatgtaaatatattttgtatatttttctatgagaagcacttcatagggagaagcacttatgacaaggctattttttaaaccgcggtattatcctaatttaaaagaagatcggtttttaataattttttattttcataggatgaagttagagaaaatattcagctgtacacacaaagtctggtttttcctgcccaacttccccctggaaggtgtactttttgttgtttaatgtgtagcttgtttgtgccctgttgacataaatgtttcctgggtttgctctttgacaataaatggagaaggaaggtcacccaactccattgggccactcccctccttcccctattgaagctcctcaaaaggctacagtaatatcttgatacaacagattctcttctttcccgcctctctcctttccggcgcaacttccagagtggtgggagacggcaatctttacatttccctcatctttcttacttcagagttagcaaacaacaagttgaatggcaacttgacatttttgcatcaccatctgcctcataggccactctttcctttccctctgcccaccaagtcctcatatctgcagagaacccattgatcaccttgtgccctcttttggggcagcctgttgaaactgaagcacagtctgaccactcacgataaagcagattttctctgcctctgccacaaggtttcagagtagtgtagtccaagtagagggtggggcacccttttctcgccgcaagaagcccattcctatggaagtctagcaaagcaatacgactcagcccagcactctctgccccaggactcatggctctgctgtgccttccatcctgggctcccttctctcctgtgaccttaagaactttgtctggtggctttgctggaacattgtcactgttttcactgtcatgcagggagcccagcactgtggccaggatggcagagacttccttgtcatcatggagaagtgccagcaggggactgggaaaagcactctacccagacctcacctcccttcctccttttgcccatgaacaagatgcagtggccctaggggttccactagtgtctgctttcctttattattgcactgtgtgaggtttttttgtaaatccttgtattcc

SEQ ID NO: 5586 - DNA, 3863 bp, Homo sapiens
gagatggagactcgctctgtcacccaggctggagtgcaatggtgagatctcggctcactgcaacctccacctcctgggttcaggcgattctcctgcctcccaatcctagtagctgggagtatcaggtgagtcgcagccccaacgcacgcccggcataatttttttatttttagtcgagacgggtttcaccacgttggccaggatggtctcgaactcctgacctcaggtgatccacccgcctcggcctcccaaagcactgggattacaggcgtgagccaccgcgcccggcctccatatccattcttgggaacacttgttgcttagctgaacggagcccgcatcctgctgtggcggcactcgccccggtgctggtctgagcagacgcctcctttctcttgcagaagaagtaagtgaggaagaaatgagtgaagatgaagaacgagaaaatgaaaaccacctcttggttgttccagagtcacggttcgaccgagattccggggagagtgaagaagcagaggaagaagtgggtgagggaacgccgcagagcagcgccctgacagagggcgactatgtgcccgactcccctgccctgtcgcccatcgagctcaagcaggagctgcccaagtacctgccggccctgcagggctgccggagcgtcgaggagttccagtgcctgaacaggatcgaggagggcacctatggagtggtctacagagcaaaagacaagaaaacagatgaaattgtggctctaaagcggctgaagatggagaaggagaaggagggcttcccgatcacgtcgctgagggagatcaacaccatcctcaaggcccagcatcccaacatcgtcaccgttagagagattgtggtgggcagcaacatggacaagatctacatcgtgatgaactatgtggagcacgacctcaagagcctgatggagaccatgaaacagcccttcctgccaggggaggtgaagaccctgatgatccagctgctgcgtggggtgaaacacctgcacgacaactggatcctgcaccgtgacctcaagacgtccaacctgctgctgagccacgccggcatcctcaaggtgggtgacttcgggctggcgcgggagtacggatcccctctgaaggcctacaccccggtcgtggtgaccctgtggtaccgcgccccagagctgctgcttggtgccaaggaatactccacggccgtggacatgtggtcagtgggttgcatcttcggggagctgctgactcagaagcctctgttccccgggaagtcagaaatcgatcagatcaacaaggtgttcaaggatctggggacccctagtgagaaaatctggcccggctacagcgagctcccagcagtcaagaagatgaccttcagcgagcacccctacaacaacctccgcaagcgcttcggggctctgctctcagaccagggcttcgacctcatgaacaagttcctgacctacttccccgggaggaggatcagcgctgaggacggcctcaagcatgagtatttccgcgagacccccctccccatcgacccctccatgttccccacgtggcccgccaagagcgagcagcagcgtgtgaagcggggcaccagcccgaggccccctgagggaggcctgggctacagccagctgggtgacgacgacctgaaggagacgggcttccaccttaccaccacgaaccagggggcctctgccgcgggccccggcttcagcctcaagttctgaaggtcagagtggaccccgtcatggggagaactcagccgggaccacaggcgtggctactgcggctggagctgcgatgagactcggaactcctcgtcttactttgtgctccatgttttgtttttgtattttggtttgtaaatttgtagaattaaatcattttccttgtaaacccgaattcgggaccatcacagtttgattagcctcagcctcaagagctggcacatgcttgtgaacttgtgctttcatattttcctaacctgtgtgctctttgtgggaggaataacccagactaggaatgccagcatctgccaagcagttgggataattcttcactattccacccttgccacagtactatgggtaggagtgacagctcgaaatatctacaaacaagtcactaaaaaagctaaaagatgccaggatcctgatgaaccaccacctccaccaagaccaatgctcagattttacctgattggtggtggtatccccatcattgtttgcggcataactgcaggcagcgaacattaagaattacggcagtcggccaaacgcaccctattgctggatggcatgggaaccctccttgggagccttctatgggccagccagcttcagcacttttgtaaactgcatgtactttctgagcatatttattcagttgaaaagacaccctgagcgcaaatatgagcttaaggagcccactggccagcaacagagattggcatgccaatgaaaatggcgaaataaatcatcaggaaatcatttctttgtctctgatttctacatcagccttggaaaatgagcacacttttcattctcagctcttggggccagccttactttgctcttatatgttgcactgtggatgtttggggctttggctgtttctttgtattaccctttggacttggtttttagcttcgtttttggagccacaagtttaagcttcagtgcattcttcatggtccaccattgtgttaatagggaggatcttagacttgcgtggatcatgacttgctgcccaggacggagctcgtattcagtgcaagtcaacgtccagccccccaactctaatgggacgaatggagaggcacccaaatgccccaatagcagtgcggagtcttcatgcacaaacaaaagtgattcaagcttcaaaattcctcccagggctgcaaattaacaaacttgcaggcggctgcagctcagtgccatgccaattctttacctttgaactccacccctcagcttgataatagtctgacagaacattcaatggacaatgatattaaaatgcacgctggcgcctttagaagttcagtttcgaacaaatgtgcactcaagccgccaccataaaaacagaagtaaaggacaccgggcaagccgactcacagtcctgagagaatatgcctacgatgtcccaacgagcgtggaaggaagcgtgcagaacggcttacctaaaagccggctgggcaataacgaaggacactcgaggagccgaagagcttatttagcctacagagagagacagtacaacccaccccagcaagacagcagcgatgcttgtagcacacttcccaaaagtagcagaaattttgaaaagccagtttcaaccactagtaaaaagatgcgttaagggaagccagctgtggttgaacttcaaaatcagcaaaaatcttatggcctcaacttggccattcagaatggaccaattaaaagcaatgggcaggagggacccttgctcggtaccgatagcactggcaatgttaccactggattatggaaacacgaaactactgtgtaacattgctgggcttcctaggcagaaattcatataaactgtgatactcacattccttgaagctatgagcatttaaaaactgtttacagccaccatagggattcaaaagaatttggaataaactttgaagttttggattttacttatttttatccccaaattgttgctattttttaggatctgaaacaaaatctttctaaaacattgttttagttgtcaaagcaccaacaggacattttgggatgtgaaatgtaatttcttggaatctgtaatttgtacttaatatttcaggcttgtatttaatataataaataggtgtttgtt

SEQ ID NO: 5587 - DNA, 5769 bp, Homo sapiens
  misc_feature (1)..(5769): n=a,t,g or c
gagctctccatgcacacctgttactgtttctgtttttacctgtaaatatctgtctctgacttccatgtctcatgcacctctatagggcaaagactgtgtcttaaacatcacggtagcctcagcatgttgtgcaatcaaggtttttttgtttttgttctttgttttttttttggtattagctttatttgtatcattttgaaatttttatcaaaaaagcagcgtgcctgctgtggttcccatcctctgggatttaggaatctttacccgattctccatccaagtctgtctttcgtattctaggctcttcctaaagttgtcattcacatataccctccagaattttatagggtgtataatctgtaacaactcggaggaagccaattgccctttagaaatatggctgcaattgcctcacttcctgtgtcatgtgactctcctagtcatcacatgacccatccacattgggaagccagaattacttgcaggagtaacctagtgcctatagctatggcaggtacctgcatccttgtttttgtttagtggatcctctatccttcagagactctggaacccctgtgctcttctcctcatctagtgaccctgaggtgatggagttttcaagtccttccagagaggtaagagagagagctcccaatcagcattgtcacagtgcttctggaatcctggcactggaatttaatgaatgacagactctctttgaatccagggccatcatggctctttgagcaaggcacagatggaggggagggtcgaagttgaaatgggtgggaagagtggtggggagcatcctgatttggggtgggcagagagttgtcatcagaagggttgcagggagagctgcacccaggtgtctgtgggccttgtcctaatgaatgtgggagaccaggccatgggcacccaaaggcagctaagccctgcccgggagagtagttgaggggtggagagggacttgcttttcagtcattcctcattctgtcctcaggaatgtcccaagccttcgggtagggtaagcatcatggctggcagcctcacaggattgcttctacttcaggcagtgtcgtgggcatcagatgagtgagtcaaggcagtggggaggtagcacagagcctcccttctgcctcatagtcctttggtagccttccagtaagctggtggtagacttttagtaggtgctcaataaatccttttgagtgactgagaccaactttggggtgaggatttttgaaaccgtcttcagtctctccaaacagctgtgtccgttctccacatccttgtcagacctcacctctgcttgtgctccctccctcccaggtggtgcccctgcatccctaaaagcttcagtacagctcggtggtctgtgtctgcaatgccacatactgtgactcttgaccccccgacctttcctgccctaggtgccttcagccgctacaagagcagaagcagtgggcattggatggagctgagtacaggaccatacaggctaattgcaccggcacaggtaaccattacacccttcaccccccgggccaggctgggtcctcctagaggtaaacggtgtcagtgatcaccatggagtttctccctgggcactgataaccctgtggatgtcctcaggcctgctactgatcctgcagccagaagttccagaaagtgaagggatttggaggggccgtgacagatgcaggtgccctcaacatccttgccctgtcaccccctgcccagaatttgctacttaaatggtacttctctgaagaagatgaggaggaaggggacaggatgacatagagccactgacacttttctttgccaattctttggaccctgacttctgcccatccctgacatttggttcctgtcttaatgccagtgaaataagatttcgccgcctatcatctgctaactgctacggactcaggctcagaaaggcctgcgcttcacccaggtgccagcctccacaggttccaacccaggagcccaagttccttttggccctgactcagacactattaggactggcaagtgataagcagagtcccatactctcctattgactcggactaccatatcttgatcatccttttctgtaggaatcggatataacatcatctgggtacccatggccagctgtgacttctccatccgcacctacacctatgcagacacccctgatgatttccagttgcacaacttcagcctcccagaggaagataccaagctcaaggtaggcattctagctttttcaggccctgagggccctgatgtctgggggttgagaaactgtagggtaggtctgcttgtacagacattttgtcccctgctgttttgtcctgggggtgggagggtgggggctaatggctgaaccggatgcactggttgggctagtatgtgttccaactctgggtgcttctctcttcactacctttgtctctagatacccctgattcaccgagccctgcagttggcccagcgtcccgtttcactccttgccagcccctggacatcacccacttggctcaagaccaggggagcggggaatgggaaggggccactcaagggacagcccagagacatctaccaccagacctgggccagatacattgtgaagtaagggatcaacaaggatgtgggatcaggactggcctcccctttggccatgctgatctgtgtcccaaccctcaacctggttccacttccagatctgcctgtcctcagctcacctttctaccttctgggcctttcaaccttgggcctgtcagtcttgcccactccatcaggcttcctgttctctcggtctggcccactttcttggctggatcattcatgacctttctcttgccaggttcctggatgcctatgctgagcacaagttacagttctgggcagtgacaggtgaaaatgagccttctgctgggctgttgagtggataccccttccagtgcctgggcttcacccctgaacatcagcgagacttcattgcccgtgacctaggtcctacccttgccaacggtactcaccacaatgtccgcctactcatgctggatgaccaacgcttgctgctgccccactgggcaaaggtggtaaggcctggacctccatggtgctccagtgaccttcaaatccagcatccaaatgattggctcccaaacttagagggatttttctacccaactatggatccctagagcaccattccccgggacctccagggtgccatggatcccacagttgggacttgaaacctctctagggctgggggtggtagctcatggctataattccagcactttgggaaccaaggtgggtggatcacttgaacctaaggagttcaagatgagcctgggaaacatggtgaaaccctaactctacaaaaaaaaaaatagaaaagttagccgggtgtggtggtggcacgctatagtcccagtattctggaggctaaggcgggaggtttagttgagcctaggaatttcaggctgcagtgagctatgattgtgccactgtactccagcctgtgtgacagagggagaccctgtctcaaaaacaaaaacaaaaaatccctcccaaaacctctgtagttgcattcttcccaccacctaattcaggattcctacaagaggaactagaagttccagaagcctgtgggcagggtccagggtgacttgttcttcctttgcaggtactgacagacccagaagcagctaagtatgttcatggtattgctgtacattggtacctggactttctggctccagccaaagccaccctaagggagacacaccacctgttccccaacaccatgctctttgcctcagaggcctgtgtgggttccaagttctgggagcagagtgtgcggctaggctcctgggatcgagggatgcagtacagccacagcatcatcacagtaagccaccccagtctcccttcctgcaaaggagacctcagacccattagtagtctcaccaaagactgatagaagcccttcctgtccagctttccccaggtagcctgcccttttgcgcaactctggggaaccatgattccctgtcttgcctttccttcacaggtctgcacacctcattgccccttttgcaactactgaggcacttgcagctgcctcagacttctcagctccccttgagatgcctggatcttcacacccccaactccttagctactaaggaatgtgccctcacagggctgacctacccacagctgcctctcccacatgtgacccttacctacactctctggggacccccagtgttgagcctttgtctctttgcctttgtccttaccctagaacctcctgtaccatgtggtcggctggaccgactggaacccatcattgtagacatcaccaagcacacgttttacaaacagcccatgttctaccaccttggccacttcaggtgagtggagggcgggcacccccattccataccaggcctatcatctcctacatcggatggcttacatcactctacaccacgagggagcaggaaggtgttcagggtggaacctcggaagaggcacacccatccccttttgcaccatggaggcaggaagtgactaggtagcaacagaaaaccccaatgcctgaggctggactgcgatgcagaaaagcagggtcagtgcccagcagcatggctccaggcctagagagccagggcagagcctttgcaggagttatggggtgggtccgtgggtgggcgacttcttagatgagggtttcatgggaggtaccccgagggactctgaccatctgttcccacattcagcaagttcattcctgagggctcccagagagtggggctggttgccagtcagaagaacgacccggacgcagtggcactgatgcatcccgatggctctcctgttgtggtcgtcctaaaccggtgagggcaatggtgaggtctgggaagtgggctgaagacagcgttgggggccttggcaggatcacactctcagcttctcctccctgctccctagctcctctaaggatgtgcctcttaccatcaaggatcctgctgtgggcttcctggagacaatctcacctggctactccattcacacctacctgtggcgtcgccagtgatggagcagatactcaaggaggcactgggctcagcctgggcattaaagggacagagtcagctcacacgctgtctgtgactaaagagggcacaacagggccagtgtgagcttacagcgacgtaagcccaggggcaatggtttgggtgactcactttcccctctaggtggtgcccagggctggaggcccctagaaaaagatcagtaagccccagtgtccccccagcccccatgcttatgtgaacatgcgctgtgtgctgcttgctttggaaactggcctgggtccaggcctagggtgagctcactgtccgtacaaacacaagatcagggctgagggtaaggaaaagaagagactaggaaagctgggcccaaaactggagactgtttgtctttcctggagatnnnnnnctgggcccgtggagcagcagtgtcagcatcagggcggaagccttaaagcagcagcgggtgtgcccaggcacccagatgattcctatggcaccagccaggaaaaatggcagctcttaaaggagaaaatgtttgagcccagtcagtgtgagtggctttattctgggtggcagcacccgtgtccggctgtaccaacaacgaggagcacgggggcctctggaagtcatgagagtagaaaaaccagtcttggggagt

SEQ ID NO: 5588 - DNA, 1196 bp, Homo sapiens
gacttcggttccggtctctgcagcagccgtgatcgcttagtggagtgcttagggtagttggccaggatgccgaatatcaaaatcttcagcggcagttcccaccaggacttatctcagaaaattgctgaccgcctgggcctggagctaggcaaggtggtgactaagaagttcagcaaccaggagacctgtgtggaaatcggtgaaagtgtacgtggagaggatgtctacattgttcagagtggttgtggcgaaatcaatgacaatttaatggagcttttgatcatgattaatgcctgcaagattgcttcagccagccgggttactgcagtcatcccatgcttcccttatgcccggcaggataagaaggataagagccgggcgccaatctcagccaagcttgttgcaaatatgctatctgtagcaggtgcagatcatattatcaccatggacctacatgcttctcaaattcagggcttttttgatatcccagtagacaatttgtatgcagagccggctgtcctaaagtggataagggagaatatctctgagtggaggaactgcactattgtctcacctgatgctggtggagctaagagagtgacctccattgcagacaggctgaatgtggactttgccttgattcacaaagaacggaagaaggccaatgaagtggaccgcatggtgcttgtgggagatgtgaaggatcgggtggccatccttgtggatgacatggctgacacttgtggcacaatctgccatgcagctgacaaacttctctcagctggcgccaccagagtttatgccatcttgactcatggaatcttctccggtcctgctatttctcgcatcaacaacgcatgctttgaggcagtagtagtcaccaataccatacctcaggaggacaagatgaagcattgctccaaaatacaggtgattgacatctctatgatccttgcagaagccatcaggagaactcacaatggagaatccgtttcttacctattcagccatgtccctttataatagagtaaggtattgatgacaaattcagcagaagacccggcttgctccagtgtagctttctacatcccacatcaggatattagaggttatccgaactggggaaagacggattgagattaactgctggacctcctacctgcattatctcattctggcttccttgataattctgt

SEQ ID NO: 5589 - DNA, 6226 bp, Homo sapiens
cgccgcccgaggagtcgtccgacagcgagcccgaggcggagcccggctccccacagaagctcatccgcaaggtgtccacgtcgggtcagatccgacagaagaccatcatcaaagaggggatgctgaccaaacagaacaattcattccagcgatcaaaaaggagatactttaagcttcgagggcgaacgctttactatgccaaaacggcaaagtcaatcatatttgatgaggtggatctgacagatgccagcgtagctgaatccagtaccaaaaacgtcaacaacagttttacggtcataactccatgcaggaagctcatcttgtgtgctgataacagaaaagaaatggaagattggattgcagcattaaagactgtgcagaacagggagcactttgagcccacccagtacagcatggaccacttctcagggatgcacaattggtacgcctgttcccacgcgaggccgacctactgcaatgtgtgccgtgaggctctgtctggggtcacgtcgcacgggctgtcctgcgaggtgtgcaaatttaaggcccacaagcgctgtgctgtgcgtgcaaccaataactgcaagtggaccacactggcctcgatcgggaaggacatcattgaagatgcagatgggattgcaatgccccaccagtggttggaaggaaacctacctgtgagcgccaagtgcactgtgtgcgacaagacctgtggcagtgtgctgcgcctgcaggactggcgctgcctctggtgcaaggccatggttcacacatcgtgtaaagaatccttgctgaccaagtgcccacttggcctgtgcaaagtgtcagtcatcccacccacggctctcaacagcatcgactccgatgggttctggaaggccagctgtcctccttcttgcacaagcccactgttggtcttcgtcaattcaaaaagtggggacaaccagggtgtgaagttcctcagaagattcaaacagctactaaaccccgcccaggtcttcgacctcatgaacggaggcccacacctcggcttacggttattccagaagtttgacacattccggattctggtttgtggcggggatggaagtgttggctgggtcctctccgaaatcgacagcctcaaccttcataaacagtgtcagctgggagtgctgccgctcggcacagggaacgacttggcccgagtactgggctggggctcagcctgcgatgacgacacccagctcccccagatcttggagaagttggagagagccagcaccaagatgctggacaggtggagcgtcatggcatacgaggccaagctcccccggcaggcctcctcctctaccgtcaccgaagacttcagcgaggattccgaggtacagcagattctcttctatgaagactcggttgcagcccacctttctaaaatcctcacctcggaccagcactcggtggtcatctcctcggccaaagtgctctgtgagacggtgaaggacttcgtggcacgggtggggaaggcctatgagaagacgaccgagagctcggaggagtcagaggtcatggccaagaagtgctctgtcctgaaagagaagctggattcccttctcaagaccttggacgatgagtcccaggcctcgtcctctctgcccaacccgccccccaccattgccgaggaggctgaagatggagatgggtcgggcagcatctgcggttccaccggagaccgcttggtggcatcagcttgcccggcccggccgcagatattccggcctcgagaacagctcatgctgagagccaacagcctgaagaaagcaattcgtcagatcatagaacacacagaaaaagctgtcgatgagcagaatgcccagacccaggagcaggagggcttcgtcctgggcctctctgagtcagaggagaagatggaccacagagtgtgcccaccactgtcccacagcgagagcttcggggtccccaaggggaggagccagcgcaaagtgtcgaaatctccgtgtgaaaagctgatcagcaaagggagtctgtccctaggcagttctgcttcccttccgccccagccgggaagccgggacggcttgcctgcgctcaacaccaagatcctgtacccaaatgtccgggctggaatgtctggttccttacccggtggctcagtcatcagtcgcctgttaattaatgctgatcccttcaactctgaaccagaaaccctagagtattacacggagaaatgtgtcatgaacaactattttggcattggcctggatgcgaagatatccctggactttaacaacaagcgcgatgagcacccagagaagtgcaggagccgaaccaagaacatgatgtggtatggagttcttggaaccaaagagttgctgcacagaacctacaagaacctggagcaaaaggtcttgctggagtgtgacgggcgacccatcccactccccagtcttcagggaattgctgtccttaacattcccagctatgccggaggaaccaacttctgggggggtaccaaggaagatgatactttcgcagctccatcattcgatgacaagattctggaggtggtcgccgtgttcggcagcatgcagatggccgtctctcgagtcatcaggctacagcatcatcggatcgcccagtgtcgcacggtgaagatctccatccttggggatgagggcgtgcctgtgcaggtggacggagaggcctgggtccagccgccagggtacattcggattgtccacaagaaccgggcacagacactgaccagagacagggcatttgagagcaccctgaagtcctgggaagacaagcagaagtgcgagctgccccgccctccatcctgttccctgcacccggagatgctgtccgaggaggaggccacccagatggaccagtttgggcaggcagcaggggtcctcattcacagtatccgagaaatagctcagtctcaccgggacatggagcaggaactggcccacgccgtcaatgccagctccaagtccatggaccgtgtgtatggcaagcccagaaccacagaggggctcaactgcagcttcgtcctggaaatggtgaataacttcagagctctgcgcagtgagacggagctgctgctgtctgggaagatggccctgcagctggatccgcctcagaaggagcagctggggagtgctcttgccgagatggaccgacagctcaggaggctggcagacaccccgtggctctgccagtccgcagagcccggcgacgaagagagtgtgatgctggatcttgccaagcgcagtcgcagtggtaaattccgcctcgtgaccaagtttaaaaaggagaaaaacaacaagaacaaagaagctcacagtagcctgggagccccggttcacctctgggggacagaggaggttgctgcctggctggagcacctcagtctctgtgagtataaggacatcttcacacggcacgacatccggggctctgagctcctgcacctggagcggagggacctcaaggacctgggcgtgaccaaggtgggccacatgaagaggatcctgtgtggcatcaaggagctgagccgcagcgcccccgccgtcgaggcctagcctctgtcctctcagcctgtggcctccacatccccgccgccgaggcctagcctccgccctctcagcctgtggcctctgcgcctcctgccactgaggccctgggcagatgctgcagcccgcccccttctcatggtgctacttcctctgtcagctacagaaagcctccgtgacaccgtccaccagagctctggggtctcgaacataacaacacagctacctttgaaacaacactttctccagctcagagtcacctggggcacatgtgtcacggccactcagctctcgcccgcctgtgctgtgggccagggaatccagcggcgtctggcctcctgggcactgcttgcctggcctcgtgcttggattgtcccgggggctcctctccgtgtgtccttctgtggccgcaccgtgtggctccgcctcctggcccccagccagttctcagaaacgtggctggggcccagcacagcagcctgcaagggcccctgtttgttgatgcagcttttgttgaacaaaaatcgtgctctttcctggtttgaaagtagcatggatgtttccagtcttgttgattgtaatttgacgtgaagagaaaaaaaaattcctcctgcgtgagccaaggcagcgggtgctgtttcccaggcggggagcccctccctgggtgtcacagggcctgtgctcctccctcctccatcctctctcctcccgctcctccctccccccactgtgggctggggacgcctgcccttctgtctccggacgctctaggcgagttcagcttggggtgtgagtgagacagctcgccagctgcatccctgcagacagaggatgtgtgtccacatgagtgtttctgtgtgggaaatgcttcctggctctgggaaactttttctgcccattctgtggttcccagggagcgtggccctggtgggccaggggtggtttgacctcttcagcccgtccggtggcctggaggccggaggctctcctgagtgtctgcccctgcagtggcttcttgtcgcctgctgctgggcgtgatgtcgctggaggtgctggcagggactctgatttggtggtccgcgctgcccctgccctgcctctgtcctggctctgaactagtagatgatggtgccagagggcagggagctcgcctggggagagggctgtgccccgtagggacagtgcccaggtgaaggatgcccctggtcctccagggcactgactttgcccttttttcccgttgatagtcatggctcagaggtgcttgtaaatgtcttgggaagaggtttctgtaacccctgccctggtgtgaggaggaaatggctctggcctggctgcctggccgtggcttctctttggctcccaaagagaaggacagtgttgggagtatctgccgtggcttctctttggctcccaaagagaaggacagtgttgggagtatctgccggcgctgtccaggtcctttagtcagcgtcactccatctgatgtgcagaagctgggctgcacctgcgggggtgggcatagaccgggctgggtctgcagcagcccctggtcctgagcaggcggcagtgaacagcactggcccacctcccactcacagcccctctgtcccctctgcagtgcacccaggtgggcccctctgcgtgcctttgggtgctcccctctcgtggtcgttctggcccgaggcccttagagtatggaggctgagccaggccttgggtttccccagcacagcctcctgtcgctgcatgcgacgtgttgggatttttggatgaaagactctcccacgctctgttggtggacttagctgcctcactggaagtgatgtgggtggaaggtggttgtatgttaccttttccacctctcattgttttccccagaacattgtagatgggggttggcagagggagaaataagccagccacggcagtcgcttggtttcccaggtggaatgggctaacacaggagatgatgggaacctgtcccgcagtccctgcatgaccattggccctgctggcctggcgatgtgggcatcctggggttcttagggtcccagaacaagccccaggcaagctggaacttgggtggggaggggacatgaggaggataaacagctgactgtggcttcaaggacatcagggccaccccaagtcctcagtgtcctactcctggcaaggagttgggtttggatcaaaagtgtttaaaattaatatgttgtcagtgattagaacaacactgtttacataaaaaccatttttctaattctaacaagttagaatgtgaggaaggaatgaacatgagtgtttaggaacctgccctttggtgctgggctggcgtcccgcactggggtgtcctcgctgtctgggggctgctctgctgcccggcccaggtccccttgtggtgttgccagacgggcctcatggtctgctgtgcagagagaggcaggaaggatccctgaagagtcttggagaaaaggttctgtgccctcaggtggggcttaccccctcgtatttataatcttaatttatatagtgaccaccgtggaaacaaacgcctcttgtattgtcatgtacatagtccatacctgagtgctgtacataagttgttctgtgtataaataaaacaagcctgtttttgatcttcc

SEQ ID NO: 5590 - DNA, 13747 bp, Homo sapiens
ggatccgccaaggactttgattattgcgtgaaagtgctgactgccaggacaggaagctagctaagatgcaagttcccagcctagagcagtggcctctggggggtctagggcggacccaagggcaaggccagggtggcagcagcttggggactctggctggctccctcccctgacactggctgaagcccaggtggtctctaacccctcccatctctccctctcatcttccccagggcatctcctcccaaccaggcaactccccgagtggcacagtggtgtgaagccatggatatcgggcccccccaaccccatgcccccagcctcctagccataaccctccctgctgacctcacagatcaacgtattaacaagactaaccatgatggatggactgctccagtccccccacctgcacaaaatttgggggccccccagactggcccggacacgggcgatgtaatagcccttgtggcctcagccttgtcccccacccactgccaagtacaatgacctcttcctctgaaacatcagtgttaccctcatccctgtccccagcatgtgactggtcactcctggggagacactccccgcccctgccacaagagccccaggtctgcagtgtgcccctcagttgagtgggcagggccgggggtggtccagccctcgcccggcccccaccccagctgcccttgctattgtctgtgcttttgaagagtgttaaattatggaagcccctcaggttcctccctgtcccgcaggacctcttatttatactaaagttccctgttttctcagcgggtctgtccccttcggaggagatgatgtagaggacctgtgtgtgtactctgtggttctaggcagtccgctttccccagaggaggagtgcaggcctgctcccagcccagcgcctcccaccccttttcatagcaggaaaagccggagcccagggagggaacggacctgcgagtcacacaactggtgacccacaccagcggctggagcaggaccctcttggggagaagagcatcctgcccgcagccagggcccctcatcaaagtcctcggtgttttttaaattatcagaactgcccaggaccacgtttcccaggccctgcccagctgggactcctcggtccttgcctcctagtttctcaggcctggccctctcaaggcccaggcaccccaggccggttggaggccccgacttccactctggagaaccgtccaccctggaaagaagagctcagattcctcttggctctcggagccgcagggagtgtgtcttcccgcgccaccctccaccccccgaaatgtttctgtttctaatcccagcctgggcaggaatgtggctccccggccaggggccaaggagctattttggggtctcgtttgcccagggagggcttggctccaccactttcctcccccagcctttgggcagcaggtcacccctgttcaggctctgagggtgccccctcctggtcctgtcctcaccaccccttccccacctcctgggaaaaaaaaaaaaaaaaaaaaaaaagctggtttaaagcagagagcctgagggctaaatttaactgtccgagtcggaatccatctctgagtcacccaagaagctgccctggcctcccgtccccttcccaggcctcaacccctttctcccacccagccccaacccccagccctcaccccctagcccccagttctggagcttgtcgggagcaagggggtggttgctactgggtcactcagcctcaattggccctgttcagcaatgggcaggttcttcttgaaattcatcacacctgtggcttcctctgtgctctacctttttattggggtgacagtgtgacagctgagattctccatgcattccccctactctagcactgaagggttctgaagggccctggaaggagggagcttggggggctggcttgtgaggggttaaggctgggaggcgggaggggggctggaccaaggggtggggagaaggggaggaggcctcggccggccgcagagagaagtggccagagaggcccaggggacagccagggacaggcagacatgcagccagggctccagggcctggacaggggctgccaggccctgtgacaggaggaccccgagcccccggcccggggaggggccatggtgctgcctgtccaacatgtcagccgaggtgcggctgaggcggctccagcagctggtgttggacccgggcttcctggggctggagcccctgctcgaccttctcctgggcgtccaccaggagctgggcgcctccgaactggcccaggacaagtacgtggccgacttcttgcagtggggtgagtgcctaccctcggggctcctgcagatggggtgggggtggggcagcagacagctctgggcacagaggcctggctgttgggggggggcagcatggcaggatgggcatggggagatcctcccatcctggggctcagagtgtggacctgggccctggggcaacatttctctgtcctatgccaccactctggaggggcagagtaaggtcagcagaggctagggtggctgtgactcagagccatggcttaggagtcacagcaggctaggctgccaacagcctcccatggcctctctgcaccccgcctcagggtcagggtcagggtcatgctgggagctccctctcctaggaccctccccccaaaagtgggctctatggccctctcccctggtttcctgtggcctggggcaagccaggagggccagcatggggcagctgccaggggcgcagccgacaggcaggtgttcggcgccagcctctccagctgccccaacaggtgcccaggcgctgggagggcggtgactcacgcgggccctgtgggagaaccagctttgcagacaggcgccaccagtgccccctcctctgcgatccaggagggacaactttgggttcttctgggtgtgtctccttctttagtaggttctgcacccacccccacccccagccccaaagtctcggttcctatgagccgtgtgggtcagacaccattcccgccaccccgggtccctgcgtcctttagttctcctggcccagggcctccaaccttccagctgtcccacaaaaccccttcttgcaagggctttccagggcctggggccagggctggaaggaggatgcttccgcttctgccagctgccttgtctgcccaacctcctccccaagcccaggactcgggctcactggtcactggtttctttcattcccagcaccctgctcctctggccctcatatgtctggccctcagtgactggtgtttggtttttgggctgtgtgtaacaaactgtgtgtgacacttgtttcctgtttctccgccttcccctgcttcctcttgtgtccatctctttctgacccaggcctggttcctttccctcctcctcccatttcacagatgggaaggtggcggccaagaagggccaggccattcagcctctggaaaaaccttctcccaacctcccacagcccctaatgactctcctggcctccctttagtagaggatgaagttgggttggcagggtaaactgagaccgggtggggtaggggtctggcgctcccgggaggagcactccttttgtggcccgagctgcatctcgcggcccctcccctgccaggcctggggcgggggagggggccagggttcctgctgccttaaaagggctcaatgtcttggctctctcctccctcccccgtcctcagccctggctggttcgtccctgctggcccactctcccggaaccccccggaacccctctctttcctccagaacccactgtctcctctccttccctcccctcccatacccaaccctctctccatcctgtcctccacttcttccacccccgggagagccaggcctcccctgtgccccacagtgccctgaggccacaagcctccaccccagctggtccccacccaggctgcccagtttaacattcctagtcataggaccttgacttctgagaggcctgattgtcatctgtaaataaggggtaggactaaagcactcctcctggaggactgagagatgggctggaccggagcacttgagtctgggatatgtgaccatgctacctttgtctccctgtcctgttccttcccccagccccaaatccagggttttccaaagtgtggttcaagaaccacctgcatctgaatctagaggtactggatacaaccccacgtctgggccgttacccaggacattctacatgagaacgtgggggtggggccctggctgcacctgaactgtcacctggagtcagggtggaaggtggaagaactgggtcttatttccttctccccttgttctttagggtctgtccttctgcagactccgttaccccaccctaaccatcctgcacacccttggagccctctgggccaatgccctgtcccgcaaagggcttctcaggcatctcacctctatgggagggcatttttggcccccagaaccttacacggtgtttatgtggggaagcccctgggaagcagacagtcctagggtgaagctgagaggcagagagaaggggagacagacagagggtggggctttcccccttgtctccagtgccctttctggtgaccctcggttcttttcccccaccacccccccagcggagcccatcgtggtgaggcttaaggaggtccgactgcagagggacgacttcgagattctgaaggtgatcggacgcggggcgttcagcgaggtaagccgaaccgggcgggagcctgacttgactcgtggtgggcggggcataggggttggggcgggcccttagaaattgatgaatgaccgagccttagaacctagggctgggctggaggcggggcttgggaccaatgggcgtggtgtggcaggtggggcggggccacggctgggtgcagaagcgggtggagttgggtctgggcgagcccttttgttttcccgccgtctccactctgtctcactatctcgacctcaggtagcggtagtgaagatgaagcagacgggccaggtgtatgccatgaagatcatgaacaagtgggacatgctgaagaggggcgaggtgaggggctgggcggacgtggggggctttgaggatccgcgccccgtctccggctgcagctcctccgggtgccctgcaggtgtcgtgcttccgtgaggagagggacgtgttggtgaatggggaccggcggtggatcacgcagctgcacttcgccttccaggatgagaactacctggtgagctccgggccggggggactaggaagagggacaagagcccgtgctgtcactggacgaggaggtggggagaggaagctctaggattgggggtgctgcccggaaacgtctgtgggaaagtctgtgtgcggtaagagggtgtgtcaggtggatgaggggccttccctatctgagacggggatggtgtccttcactgcccgtttctggggtgatctgggggactcttataaagatgtctctgttgcggggggtctcttacctggaatgggataggtcttcaggaattctaacggggccactgcctagggaaggagtgtctgggacctattctctgggtgttgggtggcctctgggttctctttcccagaacatctcagggggagtgaatctgcccagtgacatcccaggaaagtttttttgtttgtgtttttttttgaggggcgggggcgggggccgcaggtggtctctgatttggcccggcagatctctatggttatctctgggctggggctgcaggtctctgcccaaggatggggtgtctctgggaggggttgtcccagccatccgtgatggatcagggcctcaggggactaccaaccacccatgacgaaccccttctcagtacctggtcatggagtattacgtgggcggggacctgctgacactgctgagcaagtttggggagcggattccggccgagatggcgcgcttctacctggcggagattgtcatggccatagactcggtgcaccggcttggctacgtgcacaggtgggtgcagcatggccgaggggatagcaagcttgttccctggccgggttcttggaaggtcagagcccagagaggccagggcctggagagggaccttcttggttggggcccaccggggggtgcctgggagtaggggtcagaactgtagaagccctacaggggcggaacccgaggaagtggggtcccaggtggcactgcccggaggggcggagcctggtgggaccacagaagggaggttcatttatcccacccttctcttttcctcccgtgcagggacatcaaacccgacaacatcctgctggaccgctgtggccacatccgcctggccgacttcggctcttgcctcaagctgcgggcagatggaacggtgagccagtgccctggccacagagcaactggggctgctgatgagggatggaaggcacagagtgtgggagcgggactggatttggaggggaaaagaggtggtgtgacccaggcttaagtgtgcatctgtgtggcggagtattagaccaggcagagggaggggctaagcatttggggagtggttggaaggagggcccagagctggtgggcccagaggggtgggcccaagcctcgctctgctccttttggtccaggtgcggtcgctggtggctgtgggcaccccagactacctgtcccccgagatcctgcaggctgtgggcggtgggcctgggacaggcagctacgggcccgagtgtgactggtgggcgctgggtgtattcgcctatgaaatgttctatgggcagacgcccttctacgcggattccacggcggagacctatggcaagatcgtccactacaaggtgagcacggccgcagggagacctggcctctcccggtaggcgctcccaggctatcgcctcctctccctctgagcaggagcacctctctctgccgctggtggacgaaggggtccctgaggaggctcgagacttcattcagcggttgctgtgtcccccggagacacggctgggccggggtggagcaggcgacttccggacacatcccttcttctttggcctcgactgggatggtctccgggacagcgtgcccccctttacaccggatttcgaaggtgccaccgacacatgcaacttcgacttggtggaggacgggctcactgccatggtgagcgggggcggggtaggtacctgtggcccctgctcggctgcgggaacctccccatgctccctccataaagttggagtaaggacagtgcctaccttctggggtcctgaatcactcattccccagagcacctgctctgtgcccatctactactgaggacccagcagtgacctagacttacagtccagtgggggaacacagagcagtcttcagacagtaaggccccagagtgatcagggctgagacaatggagtgcagggggtgggggactcctgactcagcaaggaaggtcctggagggctttctggagtggggagctatctgagctgagacttggagggatgagaagcaggagaggactcctcctcccttaggccgtctctcttcaccgtgtaacaagctgtcatggcatgcttgctcggctctgggtgcccttttgctgaacaatactggggatccagcacggaccagatgagctctggtccctgccctcatccagttgcagtctagagaattagagaattatggagagtgtggcaggtgccctgaagggaagcaacaggatacaagaaaaaatgatgggcggcaggcaacgggtgggctcacgcctgtaacccccagcaatttggcaggccgaagtgggtggattgcttgagcccaggagttcgagaccagcctgggcaatgtggtgagacccccgtctctacaaaaatgttttaaaaattggttgggcgtggtggcgcatgcctgtatactcagctactagggtggccgacgtgggcttgagcccaggaggtcaaggctgcagtgagctgtgattgtgccactgcactccagcctgggcaacggagagagactctgtctcaaaaataagataaactgaaattaaaaaataggctgggctggccgggcgtggtggctcacgcctgtaatctcagcactttgggaggccgaggcgggtggatcacgaggtcagaagatggagaccagcctggccagcgtggcgaaaccccgtctctacccaaaaatataaaaaattagccaggcgtggtagagggcgcctgtaatctcagctactcaggacgctgaggcaggagaatcgcctgaacctgggaggcggaggttgcagtgagctgagattgcaccactgcactccagcctgggtaacagagcgagactccgtatcaaagaaaaagaaaaaagaaaaaatgctggaggggccactttagataacccctgagttggggctggtttggggggaacatgtaagccaagatccaaaagcagtgaggggcccgccctgacgactgctgctcacatctgtgtgtcttgcgcaggagacactgtcggacattcgggaaggtgcgccgctaggggtccacctgccttttgtgggctactcctactcctgcatggccctcaggtaagcactgccctggacggcctccaggggacacgaggctgcttgagcttcctgggtcctgctccttggcagccaatggagttgcaggatcagtcttggaacctcactgtttggggcccacagactcctaagaggccagagttggaggaccttaaatttctcagatctatgtacttcaaatgttagattgaattttaaaacctcagagtcacagactgggcttcccagaatcttgtaaccattaacttttacgtctgtagtacacagagccacaggacttcagaacttggcaaatatgaagtttagacttttacaatcagttgtaaaagaatgcaaattctttgaatcagccatataacaataaggccatttaaaagtattaatttaggcgggccgcggtggctcacgcctgtaatcctagcactttgggaggccaaggcaggtggatcatgaggtcaggagatcgagaccatcctggctaacacggtgaaaccccgtctctactaaaaatacaaaaaaattagccgggcatggtggcgggcgcttgcggtcccagctacttgggaggcgaggcaggagaatggcatgaacccgggaggcggagcttgcagtgagccgagatcatgccactgcactccagcctgggcgacagagcaagactccgtctcaaaaaaaaaaaaaaaaaagtttttatttaggccgggtgtggcggctcacgcctgtaatccagtgctttgggaggatgaggtgggtggatcactgaggtcaggagttcgagaccagcctgaccacgtggagaaacctcatctctactaaaaaacaaaattagccaggcgtggtggcatatacctgtaatcccagctactcaggaggctgaggcaggagaatcagaacccaggagggggaggttgtggtgagctgagatcgtgccattgcattccagcctgggcaacaagagtgaaacttcatctccaaaaaaaaaaaaaaaaagtactaaatttacaggctgggcatggtggctcacgcttggaatcccagcactttgggaggctgaagtggacggattgcttcagcccaggagttcaagaccagcctgagcaacataatgagaccctgtctctaccaaaaattgaaaaaatcgtgccaggcatggtggtctgtgcctgcagtcctagctactcaggagtctgaagtaggagaatcacttgagcctggagtttgaggcttcagtgagccatgatagattccagcctaggcaacaaagtgagacctggtctcaacaaaagtattaattacacaaataatgcattgcttatcacaagtaaattagaaaatacagataaggaaaaggaagttgatatctcgtgagctcaccagatgggcagtggtccctggctcacacgtgtactgacacatgtttaaatagtggagaacaggtgtttttttggtttgtttttttccccttcctcatgctactttgtctaagagaacagttggttttctagtcagcttttattactgggcaacattacacatactataccttatcattaatgaactccagcttgattctgaaccgctgcggggcctgaacggtgggtcaggattgaacccatcctctattagaacccaggcgcatgtccaggatagctaggtcctgagccgtgttcccacaggagggactgctgggttggaggggacagccacttcataccccagggaggagctgtccccttcccacagctgagtggggtgtgctgacctcaagttgccatcttggggtcccatgcccagtcttaggaccacatctgtggaggtggccagagccaagcagtctccccatcaggtcggcctccctgtcctgaggccctgagaagaggggtctgcagaaggtttagaaagagcagctcccaggggcccaaggccaggagaggggcagggcttttcctaagcagaggaggggctattggcctacctgggactctgttctcttcgctctgctgctccccttcctcaaatcaggaggtcttggaagcagctgcccctacccacaggccagaagttctggttctccaccagagaatcagcattctgtctccctccccactccctcctcctctccccagggacagtgaggtcccaggccccacacccatggaagtggaggccgagcagctgcttgagccacacgtgcaagcgcccagcctggagccctcggtgtccccacaggatgaaacagtaagttggtggaggggagggggtccgtcagggacaattgggagagaaaaggtgagggcttcccgggtggcgtgcactgtagagccctctagggacttcctcgaacagaagcagacagaaaccacggagagacgaggttacttcagacatgggacggtctctgtagttacagtggcgcattaagtaagggtgtgtgtgttgctggcgatctgagaagtcgatctttgagctgagcgctggtgaaggagaaacaagccatggaaggaaaggtgccaagtggtcaggcgagagcctccagggcaaaggccttgggcaggtgggaatcctgatttgttcctgaaaggtagtttgtctgagtcactacctgagaaggctggagaggccagcaggaaacacaacccagcacggcctgttgtcgtgtgggcactagggagctggagggattttgagcaccagagggacatagggtgtgttagtgtgtgagcaccagccctctggtgccctgtgtagatttagaggaccagactcagggatgggtctgagggaggtagagaagggagggggcttggatcattgcaggagctatggggattccagaaatgttgagggggcggaggagtaggggataaacaaggattcctagcctggaaccagtgtccaagtcctgagtcttccaggagccacaggcagccttaagcctggtccccacacacaggctgaagtggcagttccagcggctgtccctgcggcagaggctgaggccgaggtgacgctgcgggagctccaggaagccctggaggaggaggtgctcacccggcagagcctgagccgggagatggaggccatccgcacggacaaccagaacttcgccaggtcgggatcggggccggggccggggccgggatgcgggccggtggcaacccttggcatcccctctcgtccggcccggacggactcaccgtccttacctccccacagtcaactacgcgaggcagaggctcggaaccgggacctagaggcacacgtccggcagttgcaggagcggatggagttgctgcaggcagagggagccacaggtgagtccctcatgtgtccccttccccggaggaccgggaggaggtgggccgtctgctccgcggggcgtgtatagacacctggaggagggaagggacccacgctggggcacgccgcgccaccgccctccttcgcccctccacgcgccctatgcctctttcttctccttccagctgtcacgggggtccccagtccccgggccacggatccaccttcccatgtaagacccctctctttcccctgcctcagacctgctgcccattctgcagatcccctccctggctcctggtctccccgtccagatatagggctcaccctacgtctttgcgactttagagggcagaagccctttattcagccccagatctccctccgttcaggcctcaccagattccctccgggatctccctagataacctccccaacctcgattcccctcgctgtctctcgccccaccgctgagggctgggctgggctccgatcgggtcacctgtcccttctctctccagctagatggccccccggccgtggctgtgggccagtgcccgctggtggggccaggccccatgcaccgccgccacctgctgctccctgccagggtacgtccggctgcccacgcccccctccgccgtcgcgccccgcgctccacccgccccgtgccacccgcttagctgcgcatttgcggggctgggcccacggcaggagggcggatcttcgggcagccaatcaacacaggccgctaggaagcagccaatgacgagttcggacgggattcgaggcgtgcgagtggactaacaacagctgtaggctgttggggcgggggcggggcgcagggaagagtgcgggcccacctatgggcgtaggcggggcgagtcccaggagccaatcagaggcccatgccgggtgttgacctcgccctctccccgcaggtccctaggcctggcctatcggaggcgctttccctgctcctgttcgccgttgttctgtctcgtgccgccgccctgggctgcattgggttggtggcccacgccggccaactcaccgcagtctggcgccgcccaggagccgcccgcgctccctgaaccctagaactgtcttcgactccggggccccgttggaagactgagtgcccggggcacggcacagaagccgcgcccaccgcctgccagttcacaaccgctccgagcgtgggtctccgcccagctccagtcctgtgtaccgggcccgccccctagcggccggggagggaggggccgggtccgcggccggcgaacggggctcgaagggtccttgtagccgggaatgctgctgctgctgctgctgctgctgctgctgctggggggatcacagaccatttctttctttcggccaggctgaggccctgacgtggatgggcaaactgcaggcctgggaaggcagcaagccgggccgtccgtgttccatcctccacgcacccccacctatcgttggttcgcaaagtgcaaagctttcttgtgcatgacgccctgctctggggagcgtctggcgcgatctctgcctgcttactcgggaaatttgcttttgccaaacccgctttttcggggatcccgcgcccccctcctcacttgcgctgctctcggagccccagccggctccgcccgcttcggcggtttggatatttattgacctcgtcctccgactcgctgacaggctacaggacccccaacaaccccaatccacgttttggatgcactgagaccccgacattcctcggtatttattgtctgtccccacctaggacccccacccccgaccctcgcgaataaaaggccctccatctgccc

SEQ ID NO: 5591 - DNA, 1805 bp, Homo sapiens
tattgtacaattacccaccactggatttgactcagagaggacccccagagggtgtctccatcttccctatttattttcagcccttgagggcttcattgtagatcaaagccaaggcccccaggaaggtgacatactcctggaagttcacctcctggtccttgttccggtccaagtcttccatcagccttgcaatttcagcatcctgcagcttctaatgtgttagaatgtgaaatccatactcagtggtgatgacaaccctggattcttccccttccccctcccaggcaatcctctctgcaagtggctctgtgctccctcatcaccaaggacccatgtcactttggcattgcttctcctcagctacttctcagttactggtcctcatttggagagatggagaccggcagcaactctgaggaggcatcagagcagtctgccgaagaagtaagtgaggaagaaatgagtgaagatgaagaacgagaaaatgaaaaccacctcttggttgttccagagtcacggttcgaccgagattccggggagagtgaagaagcagaggaagaagtgggtgagggaacgccgcagagcagcgccctgacagagggcgactatgtgcccgactcccctgccctgtcgcccatcgagctcaagcaggagctgcccaagtacctgccggccctgcagggctgccggagcgtcgaggagttccagtgcctgaacaggatcgaggagggcacctatggagtggtctacagagcaaaagacaagaaaacagatgaaattgtggctctaaagcggctgaagatggagaaggagaaggagggcttcccgatcacgtcgctgagggagatcaacaccatcctcaaggcccagcatcccaacatcgtcaccgttagagagattgtggtgggcagcaacatggacaagatctacatcgtgatgaactatgtggagcacgacctcaagagcctgatggagaccatgaaacagcccttcctgccaggggaggtgaagaccctgatgatccagctgctgcgtggggtgaaacacctgcacgacaactggatcctgcaccgtgacctcaagacgtccaacctgctgctgagccacgccggcatcctcaaggtgggtgacttcgggctggcgcgggagtacggatcccctctgaaggcctacaccccggtcgtggtgaccctgtggtaccgcgccccagagctgctgcttggtgccaaggaatactccacggccgtggacatgtggtcagtgggttgcatcttcggggagctgctgactcagaagcctctgttccccgggaagtcagaaatcgatcagatcaacaaggtgttcaaggatctggggacccctagtgagaaaatctggcccggctacagcgagctcccagcagtcaagaagatgaccttcagcagacacccctacaacaacctccgcaagcgcttcggggctctgctctcagaccagggcttcgacctcatgaacaagttcctgacctacttccccgggaggaggatcagcgctgaggacggcctcaagcatgagtatttccgcgagacccccctccccatcgacccctccatgttccccacgtggcccgccaagagcgagcagcagcgtgtgaagcggggcaccagcccgaggccccctgagggaggcctgggctacagccagctgggtgacgacgacctgaaggagacgggcttccaccttaccaccacgaaccagggggcctctgccgcgggccccggcttcagcctcaagttctgaaggtcagagtggaccccgtcatgggg

SEQ ID NO: 5592 - DNA, 2462 bp, Homo sapiens
tcaacaggcaggggcagcactgcagagatttcatcatggtctcccaggccctcaggctcctctgccttctgcttgggcttcagggctgcctggctgcaggcggggtcgctaaggcctcaggaggagaaacacgggacatgccgtggaagccggggcctcacagagtcttcgtaacccaggaggaagcccacggcgtcctgcaccggcgccggcgcgccaacgcgttcctggaggagctgcggccgggctccctggagagggagtgcaaggaggagcagtgctccttcgaggaggcccgggagatcttcaaggacgcggagaggacgaagctgttctggatttcttacagtgatggggaccagtgtgcctcaagtccatgccagaatgggggctcctgcaaggaccagctccagtcctatatctgcttctgcctccctgccttcgagggccggaactgtgagacgcacaaggatgaccagctgatctgtgtgaacgagaacggcggctgtgagcagtactgcagtgaccacacgggcaccaagcgctcctgtcggtgccacgaggggtactctctgctggcagacggggtgtcctgcacacccacagttgaatatccatgtggaaaaatacctattctagaaaaaagaaatgccagcaaaccccaaggccgaattgtggggggcaaggtgtgccccaaaggggagtgtccatggcaggtcctgttgttggtgaatggagctcagttgtgtggggggaccctgatcaacaccatctgggtggtctccgcggcccactgtttcgacaaaatcaagaactggaggaacctgatcgcggtgctgggcgagcacgacctcagcgagcacgacggggatgagcagagccggcgggtggcgcaggtcatcatccccagcacgtacgtcccgggcaccaccaaccacgacatcgcgctgctccgcctgcaccagcccgtggtcctcactgaccatgtggtgcccctctgcctgcccgaacggacgttctctgagaggacgctggccttcgtgcgcttctcattggtcagcggctggggccagctgctggaccgtggcgccacggccctggagctcatggtgctcaacgtgccccggctgatgacccaggactgcctgcagcagtcacggaaggtgggagactccccaaatatcacggagtacatgttctgtgccggctactcggatggcagcaaggactcctgcaagggggacagtggaggcccacatgccacccactaccggggcacgtggtacctgacgggcatcgtcagctggggccagggctgcgcaaccgtgggccactttggggtgtacaccagggtctcccagtacatcgagtggctgcaaaagctcatgcgctcagagccacgcccaggagtcctcctgcgagccccatttccctagcccagcagccctggcctgtggagagaaagccaaggctgcgtcgaactgtcctggcaccaaatcccatatattcttctgcagttaatggggtagaggagggcatgggagggagggagaggtggggagggagacagagacagaaacagagagagacagagacagagagagactgagggagagactctgaggacatggagagagactcaaagagactccaagattcaaagagactaatagagacacagagatggaatagaaaagatgagaggcagaggcagacaggcgctggacagaggggcaggggagtgccaaggttgtcctggaggcagacagcccagctgagcctccttacctcccttcagccaagccccacctgcacgtgatctgctggccctcaggctgctgctctgccttcattgctggagacagtagaggcatgaacacacatggatgcacacacacacacgccaatgcacacacacagagatatgcacacacacggatgcacacacagatggtcacacagagatacgcaaacacaccgatgcacacgcacatagagatatgcacacacagatgcacacacagatatacacatggatgcacgcacatgccaatgcacgcacacatcagtgcacacggatgcacagagatatgcacacaccgatgtgcgcacacacagatatgcacacacatggatgagcacacacacaccaagtgcgcacacacaccgatgtacacacacagatgcacacacagatgcacacacaccgatgctgactccatgtgtgctgtcctctgaaggcggttgtttagctctcacttttctggttcttatccattatcatcttcacttcagacaattcagaagcatcaccatgcatggtggcgaatgcccccaaactctcccccaaatgtatttctcccttcgctgggtgccgggctgcacagactattccccacctgcttcccagcttcacaataaacggctgcgtctcctccgcacacctgtggtgcctgccaccc

SEQ ID NO: 5593 - DNA, 1739 bp, Homo sapiens
ggggatcactgttggaaggcagctgcttgaggtccaaggcagtcagtgtcccctctcttttgcctcgggacagctggtatttatcagactcctaagaagttttccttgctccctagtagaagagagagattatgcagcgggcttttgattgatccaatgggaattacattgatctggtgtctggccttggttcttatcaagtggatcacctctaagaggcgtggagctatttcctatgacagttctgatcagactgcattatacattcgtatgctaggagatgtacgtgtaaggagccgagcaggatttgaatcagaaagaagaggttctcacccatatattgattttcgtattttccactctcaatctgaaattgaagtgtctgtctctgcaaggaatatcagaaggctactaagtttccagcgatatcttagatcttcacgcttttttcgtggtactgcggtttcaaattccctaaacattttagatgatgattataatggacaagccaagtgtatgctggaaaaagttggaaattggaattttgatatctttctatttgatagactaacaaatggaaatagtctagtaagcttaacctttcatttatttagtcttcatggattaattgagtacttccatttagatatgatgaaacttcgtagatttttagttatgattcaagaagattaccacagtcaaaatccttaccataacgcagtccacgctgcggatgttactcaggccatgcactgttacttaaaggaacctaagcttgccaattctgtaactccttgggatatcttgctgagcttaattgcagctgccactcatgatctggatcatccaggtgttaatcaacctttccttattaaaactaaccattacttggcaactttatacaagaatacctcagtactggaaaatcaccactggagatctgcagtgggcttattgagagaatcaggcttattctcacatctgccattagaaagcaggcaacaaatggagacacagataggtgctctgatactagccacagacatcagtcgccagaatgagtatctgtctttgtttaggtcccatttggatagaggtgatttatgcctagaagacaccagacacagacatttggttttacagatggctttgaaatgtgctgatatttgtaacccatgtcggacgtgggaattaagcaagcagtggagtgaaaaagtaacggaggaattcttccatcaaggagatatagaaaaaaaatatcatttgggtgtgagtccactttgcgatcgtcacactgaatctattgccaacatccagattggttttatgacttacctagtggagcctttatttacagaatgggccaggttttccaatacaaggctatcccagacaatgcttggacacgtggggctgaataaagccagctggaagggactgcagagagaacagtcgagcagtgaggacactgatgctgcatttgagttgaactcacagttattacctcaggaaaatcggttatcataacccccagaaccagtgggacaaactgcctcctggaggtttttagaaatgtgaaatggggtcttgaggtgagagaacttaactcttgactgccaaggtttccaagtgagtgatgccagccagcattatttatttccaagatttcctctgttggatcatttgaacccacttgttaattgcaagacccgaacatacagcaatatgaatttggcttt

SEQ ID NO: 5594 - DNA, 3291 bp, Homo sapiens; identical to SEQ ID NO: 4205

SEQ ID NO: 5595 - DNA, 816 bp, Homo sapiens
ggggctgcgcggcggtggcggcggcgctcctcctggtgctgctgggggcccgggcccagggcggcactcgtagccccaggtgtgactgtgccggtgacttccacaagaagattggtctgttttgttgcagaggctgcccagcggggcactacctgaaggccccttgcacggagccctgcggcaactccacctgccttgtgtgtccccaagacaccttcttggcctgggagaaccaccataattctgaatgtgcccgctgccaggcctgtgatgagcaggcctcccaggtggcgctggagaactgttcagcagtggccgacacccgctgtggctgtaagccaggctggtttgtggagtgccaggtcagccaatgtgtcagcagttcacccttctactgccaaccatgcctagactgcggggccctgcaccgccacacacggctactctgttcccgcagagatactgactgtgggacctgcctgcctggcttctatgaacatggcgatggctgcgtgtcctgccccacgtaattcctagctgtcgtgggatggagggaagggcggctgggagcagagcaggggacctggggtggggcaggtgctgctggttcaggaataggaagaggggatagggaggagggagccttggccctgtgatgggtgggccccacttcaggcaaacttagatggcaaaagagcaatctggatccgccttagccagatacataagggtatttgccttcactttcagccagcattccccccagcgatcctagccagatattacagatggtaaccctcgtgccgaattcttgcc

SEQ ID NO: 5596 - DNA, 1475 bp, Homo sapiens
aaagcaaatcattcaacgacccccgaccctccgacggcaggagccccccgacctcccaggcggacccgctccctccccgcgcggcgttccgggcccggcgagaggcgcgagcacagccgaggccatggaggtgacggcggaccagccgcgctgggtgagccaccaccaccccgccgtgctcaacgggcagcacccggacacgcaccacccgggcctcagccactcctacatggacgcggcgcagtacccgctgccggaggaggtggatgtgctttttaacatcgacggtcaaggcaaccacgtcccgccctactacggaaactcggtcagggccacggtgcagaggtaccctccgacccaccacgggagccaggtgtgccgcccgcctctgcttcatggatccctaccctggctggacggcggcaaagtcctgggcagccaccacaccgcctccccctggaatctcagccccttctccaagacgtccatccaccacggctccccggggcccctctccgtctaccccccggcctcgtcctcctccttgtcggggggccacgccagcccgcacctcttcaccttcccgcccaccccgccgaaggacgtctccccggacccatcgctgtccaccccaggctccggcggctcggcccggcaggacgagaaagagtgcctcaagtaccaggtgcccctgcccgacagcatgaagctggagtcgtcccactcccgtggcagcatgaccgccctgggtggagcctcctcgtcgacccaccaccccatcaccacctacccgccctacgtgcccgagtacagctccggactcttcccccccagcagcctgctgggcggctcccccaccggcttcggatgcaagtccaggcccaaggcccggtccagcacaggcagggagtgtgtgaactgtggggcaacctcgaccccactgtggcggcgagatggcacgggacactacctgtgcaacgcctgcgggctctatcacaaaatgaacggacagaaccggcccctcattaagcccaagcgaaggctgtctgcagccaggagagcagggacgtcctgtgcgaactgtcagaccaccacaaccacactctggaggaggaatgccaatggggaccctgtctgcaatgcctgtgggctctactacaagcttcacaatattaacagacccctgactatgaagaaggaaggcatccagaccagaaaccgaaaaatgtctagcaaatccaaaaagtgcaaaaaagtgcatgactcactggaggacttccccaagaacagctcgtttaacccggccgccctctccagacacatgtcctccctgagccacatctcgcccttcagccactccagccacatgctgaccacgcccacgccgatgcacccgccatccagcctgtcctttggaccacaccacccctccagcatggtcaccgccatgggttagagccctgctcgatgctcac

SEQ ID NO: 5597 - DNA, 1283 bp, Homo sapiens
ctctctgctcctcctgttcgacagtcagccgcatcttcttttgcgtcgccagccgagccacatcgctcagacaccatggggaaggtgaaggtcggagtcaacggatttggtcgtattgggcgcctggtcaccagggctgcttttaactctggtaaagtggatattgttgccatcaatgaccccttcattgacctcaactacatggtttacatgttccaatatgattccacccatggcaaattccatggcaccgtcaaggctgagaacgggaagcttgtcatcaatggaaatcccatcaccatcttccaggagcgagatccctccaaaatcaagtggggcgatgctggcgctgagtacgtcgtggagtccactggcgtcttcaccaccatggagaaggctggggctcatttgcaggggggagccaaaagggtcatcatctctgccccctctgctgatgcccccatgttcgtcatgggtgtgaaccatgagaagtatgacaacagcctcaagatcatcagcaatgcctcctgcaccaccaactgcttagcacccctggccaaggtcatccatgacaactttggtatcgtggaaggactcatgaccacagtccatgccatcactgccacccagaagactgtggatggcccctccgggaaactgtggcgtgatggccgcggggctctccagaacatcatccctgcctctactggcgctgccaaggctgtgggcaaggtcatccctgagctgaacgggaagctcactggcatggccttccgtgtccccactgccaacgtgtcagtggtggacctgacctgccgtctagaaaaacctgccaaatatgatgacatcaagaaggtggtgaagcaggcgtcggagggccccctcaagggcatcctgggctacactgagcaccaggtggtctcctctgacttcaacagcgacacccactcctccacctttgacgctggggctggcattgccctcaacgaccactttgtcaagctcatttcctggtatgacaacgaatttggctacagcaacagggtggtggacctcatggcccacatggcctccaaggagtaagacccctggaccaccagccccagcaagagcacaagaggaagagagagaccctcactgctggggagtccctgccacactcagtcccccaccacactgaatctcccctcctcacagttgccatgtagaccccttgaagaggggaggggcctagggagccgcaccttgtcatgtaccatcaataaagtaccctgtgctcaacc

SEQ ID NO: 5598 - DNA, 168 bp, Homo sapiens
  misc_feature (1)..(168): n=a,t,g or c
cgcccgcacgagcccgacctttccgccgcgctcaaggacacccgcgcgcagtacgagaagctggccgccatgaacatgcaaaacgctgaaggattttttgaagaacccggattcaccgtgctgaccgagagcgccgccaagaacccgangccgtgcgcgccgccaacg

SEQ ID NO: 5599 - DNA, 304 bp, Homo sapiens
ctttataatatgtgcttcttaccagtcaaaaagtattataaactattagaaaagaaaatctaaaggtagaaattttaaaattcatttaacaagtaaattttacttttttttttttttttttttttttactgttcttcctcagacattcaaacgtgttttgatcaaagaagaggagtatgattctattatagtatataactcggtcttcatgcagagactgaaaacaaatattttgcagtatgcttccaccagggtaggtcaaaagtatcctttgattggaaaaatctaatgtaatgggtccacc

SEQ ID NO: 5600 - DNA, 701 bp, Homo sapiens
tgctattggctaacattacagtttcgctttaaccaatgggattgcggttttgaaaaacacttattttgattggacaaagttaatatacgtttccaggactcaccactggttaaacgcacaacttcattctctaccccacttgcgttaagaagcagtgaataagcggtaggttgacagagctaccgtcttcctgtttttttcctccaattttccggcagttactcccagtcatgcccgagccctcaaagtccgctcctgccccgaagaaaggctccaagaaggcagtgacaaaggcccagaagaaggacggcaagaagcgcaagcgcagccgcaaggagagctactccgtgtacgtgtacaaggtgctgaagcaggtccaccccgacaccggtatctcgtccaaggccatgggcatcatgaactccttcgtcaatgacatcttcgagcgcatcgccggcgaggcttcccgcctggcgcattacaacaagcgctcgaccatcacctccagggagatccagacggccgtgcgcctgctgctgccaggggagctggccaagcacgcggtgtcggagggcaccaaggccgtcaccaagtacaccagttccaagtgagcccgcccaccgcggaacgttcggtcagtctcggcccacaccccaaaggctcttttcagagccactcagtcttcccaaagagaactggca

SEQ ID NO: 5601 - DNA, 1953 bp, Homo sapiens
agccggaagtcatccttgctgaggctggggcaaccaccgcaggtcgagacagcaggcggctcaagtggacagccgggatggcagagcgtgcgccgctggaggagctggtgaaacttcagggagagcgcgtgcgaggcctcaagcagcagaaggccagcgccgagctgatcgaggaggaggtggcgaaactcctgaaactgaaggcacagctgggtcctgatgaaagcaaacagaaatttgtgctcaaaacccccaagggcacaagagactatagtccccggcagatggcagttcgcgagaaggtgtttgacgtaatcatccgttgcttcaagcgccacggtgcagaagtcattgatacacctgtatttgaactaaaggaaacactgatgggaaagtatggggaagactccaagcttatctatgacctgaaggatcagggcggggagctcctgtcccttcgctatgacctcactgttccttttgctcggtatttggcaatgaataaactgaccaacattaaacgctaccacatagcaaaggtatatcggcgggataacccagccatgaccggaggccgatatccgaattctatcactgtggattttgacatcgctggccagtttgatcccatgaatcctgatgcagagtccctgaagatcatgtgcgagatcctgagttcacttcagataggcaacttcctggtcaaggtaaatgatcggcgcatcctagatggaatgtttgctgtctgtggtgttcctgatagcaagttccgtaccatctgctcctcagtggacaaactagataaggtgtcctgggaggaagtaaagaatgagatggtgggagagaagggccttgcaccagaagtggctgatcgcattggggactatgtccagcaacatggtggggtttccctggtggaacaactggtccaggatcctaaactatcccaaaacaagcaggccttggagggcttgggagacctgaagttgctctttgagtacctgaccctatttggcattgatgacaaaatctcctttgacctgagccttgctcgagggctggattactacactggggtgatctatgaggcagtgctgctacagaccccagcccaggagggggaagagccctggtgtgggcagtgtggctgctggaggcgctatgatgggctagtgggcatgttcgacccccaaaggcgcaaggtcgccatgtgtggggctcagcattggggtggacggattttctccatcgtggaacagagactagaggctttggaggagaagatacggaccacggagacacaggtgcttgtggcatctgcacagaaaaagctggctagaggaaagactaaagcttgtctcagactgtgggatgctgggatcaaggctgagctgctgtacaagaagaacccaaagctactgaaccagttacagtactgtgaggaggcaggcatcccactggtggctatcatcggcgagcaggaactcaaggatggggtcatcaagctccgttcagtgacgagcagggaagaggtggatgtccgaagagaagagcttgtggaggaaatcaaaaggagaacaggccagcccctctgcatctgctgaactgaacaaactatcagaggaaaggaagtgggactggcactatttgaggttaagacaaactgcatatgtacttcaattgctttgcacttttccgtttcagcggaagacctgaagagtggtcagaacagagcctttgatttttattatggttattttattgattattactggcaaaaacggccaggtacaacacctttttcatacaaggcccaggaggcttagtccagtctgtgctcctgggctacaaggacccagcctgagatggtcccatctgcagggcccgcaccagttggagcagatacctccccaccaccaattgccaaaggtccaataaaatgcctcaaccacg

SEQ ID NO: 5602 - DNA, 649 bp, Homo sapiens
tccagtacagaacctgctaaggccatcaaacctattgatcggaagtcagtccatcagatttgctctgggccagtggtactgagtctaagcactgcagtgaaggagttagtagaaaacagtctggatgctggtgccactaatattgatctaaagcttaaggactatggagtggatctcattgaagtttcagacaatggatgtggggtagaagaagaaaactttgaaggcttaactctttcagctctgaaacatcacacatgtaagattcaagagtttgccgacctaactgaagttgaaactttcggttttcagggggaagctctgagctcactgtgtgcactgagcgatgtcaccatttctacctgccacgcgtcggtgaaggttgggactcgactggtgtttgatcacgatgggaaaatcatccaggaaaccccctaccccccaccccagaggaccacagtcagcgtgaagcagttattttctacgctacctgtgcgccataaggaatttcaaaggaatattaagaagacgtgcctgcttccccttcgccttctgccgtgattgtcagtttcctgaggcctccccagccatgcttcctgtacagcctgcagaactgtgagccaattaaacctcttttcttcaataaatt

SEQ ID NO: 5603 - DNA, 4003 bp, Homo sapiens; identical to SEQ ID NO: 1013

SEQ ID NO: 5604 - DNA, 4003 bp, Homo sapiens; identical to SEQ ID NO: 1013

SEQ ID NO: 5605 - DNA, 522 bp, Homo sapiens
ggagaaaaagacagaacaaagatggaagtggcctgggcccctgggggtgggtcctctctgttgtttttaatctgcaccttatagactgatgtctctttggccggagccagatctgcccctcagtgcattcgtgtgctcgcacgcgcagacatcccttctcccccatacacacatatacactcacagcctctctggcctcttcccttggggaggggccacctgtagtatttgccttgatttggtggggtacagtggatgtgaatactgtaaatagcttgtgctcagactcctctgcgtggagagggtgggtgcaggaggcagaccctccccccaaagccccctggggagatcttcctctctctatttaactgtaactgagggggatcccaggtctggggatgggggacaccttgggccacaggatactggttgcttcaggggtaccatgccccctgccctcgcctggaatcagtgttctgcatctgattaaatgtctccagaaataaagaataattctgccaa

SEQ ID NO: 5606 - DNA, 269 bp, Homo sapiens; identical to SEQ ID NO: 2070

SEQ ID NO: 5607 - DNA, 271 bp, Homo sapiens
gaacccttcaggccatgctcttgggtgtctggattctgctgcttctggcatctctggcccctctgtggctgtactgctggagaatgttcccaaccaaagggaaaagagaccagaaggaaatgttggaagtgagtggaatctagccatgcctctcctgattattagtgcctggtgcttctgcaccgggcgtccctgcatctgactgctggaagaagaaccagacttaggaaaagaggctcttcaacagcccagttattctggcccatgacct

SEQ ID NO: 5608 - DNA, 278 bp, Homo sapiens
gctgggaagagcttcagcagtcccatgtgcacgtccatgacttgcagagctttggccttgacaacatcaacatgacccactgtgtacatgaaggtggacggagaggtactgaggactcatcgattcgctcatctaccactcagcacgagccatccagaaggaaattgatctagggaggacaccgtagtcaccctcggtcttcctctgtctctctttctcctggcctgtggtgtccccagccttgccaccttcacctctggtcagcccagcccaggtga

SEQ ID NO: 5609 - DNA, 518 bp, Homo sapiens; identical to SEQ ID NO: 4223
  misc_feature (1)..(518): n=a,t,g or c

SEQ ID NO: 5610 - DNA, 491 bp, Homo sapiens; identical to SEQ ID NO: 872
  misc_feature (1)..(491): n=a,t,g or c

SEQ ID NO: 5611 - DNA, 260 bp, Homo sapiens; identical to SEQ ID NO: 887

SEQ ID NO: 5612 - DNA, 169 bp, Homo sapiens
  misc_feature (1)..(169): n=a,t,g or c
cccagctgccccagccctggtctntggcgcatcttttccctcttgtcccgaagatctgcgcctctagtgccttttaaggggttcccatcatccctccctgatattgtattgaaaatattatgcacactgttcatgcttctactaatcaataaacgctttatttaaagcc

SEQ ID NO: 5613 - DNA, 313 bp, Homo sapiens
ccagcagaggcggctcaggttgcccagctctgtggcctcaggactctctgcctcacccgcttcagcccagggcccctggagactgatcccctctgagtcctctgccccttccaaggacactaatgagcctgggagggtggcagggaggaggggacagcttcacccttggaagtcctggggttttcctcttccttctttgtggtttctgttttgtaatttaagaagagctattcatcactgtaattattattattttctacaataaatgggacctgtgtacaggaaaaagcgaaaaaaaaaaaaaaaaaaaacc

SEQ ID NO: 5614 - DNA, 532 bp, Homo sapiens; identical to SEQ ID NO: 1678

SEQ ID NO: 5615 - DNA, 263 bp, Homo sapiens
ctgatgggtataactgacccccacagggaggcaggaaaacagccagaagccaccttgacacttttgaacatttccagttctgtagagtttattgtcaattgcttctcaagtctaaccagcctcagcagtgtgcatagaccatttccaggagggtctgtcccagatgctctgcctcccgttccaaaacccactcatcctcagcttgcacaaactggttgaacggcaggaatgaaagataaagagagatggcttttgtgataaaa

SEQ ID NO: 5616 - DNA, 6252 bp, Homo sapiens
gcggggggcaatggcactgcagctctgggccctgaccctgctgggcctgctgggcgcaggtgccagcctgaggccccgcaagctggacttcttccgcagcgagaaagagctgaaccacctggctgtggatgaggcctcaggcgtggtgtacctgggggcggtgaatgccctctaccagctggatgcgaagctgcagctggagcagcaggtggccacgggcccggccctggacaacaagaagtgcacgccgcccatcgaggccagccagtgccatgaggctgagatgactgacaatgtcaaccagctgctgctgctcgaccctcccaggaagcgcctggtggagtgcggcagcctcttcaagggcatctgcgctctgcgcgccctgagcaacatctccctccgcctgttctacgaggacggcagcggggagaagtctttcgtggccagcaatgatgagggcgtggccacagtggggctggtgagctccacgggtcctggtggtgaccgcgtgctgtttgtgggcaaaggcaatgggccacacgacaacggcatcatcgtgagcactcggctgttggaccggactgacagcagggaggcctttgaagcctacacggaccacgccacctacaaggccggctacctgtccaccaacacacagcagttcgtggcggccttcgaggacggcccctacgtcttctttgtcttcaaccagcaggacaagcacccggcccggaaccgcacgctgctggcacgcatgtgcagagaagaccccaactactactcctacctggagatggacctgcagtgccgggaccccgacatccacgccgctgcctttggcacctgcctggccgcctccgtggctgcgcctggctctggcagggtgctatatgctgtcttcagcagagacagccggagcagtggggggcccggtgcgggcctctgcctgttcccgctggacaaggtgcacgccaagatggaggccaaccgcaacgcctgttacacaggcacccgggaggcccgtgacatcttctacaagcccttccacggcgatatccagtgcggcggccacgcgccgggctccagcaagagcttcccatgtggctcggagcacctgccctacccgctgggcagccgcgacgggctcagaggcacagccgtgctgcagcgtggaggcctgaacctcacggccgtgacggtcgccgccgagaacaaccacactgttgcttttctgggcacctctgatggccggatcctcaaggtgtacctcaccccagatggcacctcctcagagtacgactctatccttgtggagataaacaagagagtcaagcgcgacctggtactgtctggagacctgggcagcctgtacgccatgacccaggacaaggtgttccggctgccggtgcaggagtgcctgagctacccgacctgcacccagtgccgcgactcccaggacccctactgcggctggtgcgtcgtcgagggacgatgcacccggaaggccgagtgtccgcgggccgaggaggccagccactggctgtggagccgaagcaagtcctgcgtggccgtcaccagcgcccagccacagaacatgagccggcgggcccagggggaggtgcagctgaccgtcagccccctccctgccctgagcgaggaggacgagttgctgtgcctttttggggagtcgccgccacaccccgcccgcgtggagggcgaggccgtcatctgcaactccccaagcagcatccccgtcacaccgccaggccaggaccacgtggccgtgaccatccagctcctccttagacgaggcaacatcttcctcacgtcctaccagtaccccttctacgactgccgccaggccatgagcctggaggagaacctgccgtgcatctcctgcgtgagcaaccgctggacctgccagtgggacctgcgctaccacgagtgccgggaggcttcgcccaaccctgaggacggcatcgtccgtgcccacatggaggacagctgtccccagttcctgggacccagccccctggtgatccccatgaaccacgagacagatgtgaacttccagggcaagaacctggacaccgtgaagggttcctccctgcacgtgggcagtgacttgctcaagttcatggagccggtgaccatgcaggaatctgggaccttcgcctttcggaccccaaagctgtcccacgatgccaacgagacgctgcccctgcacctctacgtcaagtcttacggcaagaatatcgacagcaagctccatgtgaccctctacaactgctcctttggccgcagcgactgcagcctgtgccgggccgctaaccccgactacaggtgtgcgtggtgcgggggccagagcaggtgcgtgtatgaggccctgtgcaacaccacctccgagtgcccgccgcccgtcatcaccaggatccagcctgagacgggccccctgggtgggggcatccgcatcaccatcctggggtccaatttgggcgtccaagcaggggacatccagaggatctctgtggccggccggaactgctcctttcagccggaacgttactccgtgtccacccggatcgtgtgtgtgatcgaggctgcggagacgcctttcacggggggtgtcgaggtggacgtcttcgggaaactgggccgttcgcctcccaatgtccagttcaccttccaacagcccaagcctctcagtgtggagccgcagcagggaccgcaggcgggcggcaccacactgaccatccacggcacccacctggacacgggctcccaggaggacgtgcgggtgaccctcaacggcgtcccgtgtaaagtgacgaagtttggggcgcagctccagtgtgtcactggcccccaggcgacacggggccagatgcttctggaggtctcctacggggggtcccccgtgcccaaccccggcatcttcttcacctaccgcgaaaaccccgtactgcgagccttcgagccgctacgaagctttgccagtggtggccgcagcatcaacgtcacgggtcagggcttcagcctgatccagaggtttgccatggtggtcatcgcggagcccctgcagtcctggcagccgccgcgggaggctgaatccctgcagcccatgacggtggtgggtacagactacgtgttccacaatgacaccaaggtcgtcttcctgtccccggctgtgcctgaggagccagaggcctacaacctcacggtgctgatcgagatggacgggcaccgtgccctgctcagaacagaggccggggccttcgagtacgtgcctgaccccacctttgagaacttcacaggtggcgtcaagaagcaggtcaacaagctcatccacgcccggggcaccaatctgaacaaggcgatgacgctgcaggaggccgaggccttcgtgggtgccgagcgctgcaccatgaagacgctgacggagaccgacctgtactgtgagcccccggaggtgcagcccccgcccaagcggcggcagaaacgagacaccacacacaacctgcccgagttcattgtgaagttcggctctcgcgagtgggtgctgggccgcgtggagtacgacacacgggtgagcgacgtgccgctcagcctcatcttgccgctggtcatcgtgcccatggtggtcgtcatcgcggtgtctgtctactgctactggaggaagagccagcaggccgaacgagagtatgagaagatcaagtcccagctggagggcctggaggagagcgtgcgggaccgctgcaagaaggaattcacagacctgatgatcgagatggaggaccagaccaacgacgtgcacgaggccggcatccccgtgctggactacaagacctacaccgaccgcgtcttcttcctgccctccaaggacggcgacaaggacgtgatgatcaccggcaagctggacatccctgagccgcggcggccggtggtggagcaggccctctaccagttctccaacctgctgaacagcaagtctttcctcatcaatttcatccacaccctggagaaccagcgggagttctcggcccgcgccaaggtctacttcgcgtccctgctgacggtggcgctgcacgggaaactggagtactacacggacatcatgcacacgctcttcctggagctcctggagcagtacgtggtggccaagaaccccaagctgatgctgcgcaggtctgagactgtggtggagaggatgctgtccaactggatgtccatctgcctgtaccagtacctcaaggacagtgccggggagcccctgtacaagctcttcaaggccatcaaacatcaggtggaaaagggcccggtggatgcggtacagaagaaggccaagtacactctcaacgacacggggctgctgggggatgatgtggagtacgcacccctgacggtgagcgtgatcgtgcaggacgagggagtggacgccatcccggtgaaggtcctcaactgtgacaccatctcccaggtcaaggagaagatcattgaccaggtgtaccgtgggcagccctgctcctgctggcccaggccagacagcgtggtcctggagtggcgtccgggctccacagcgcagatcctgtcggacctggacctgacgtcacagcgggagggccggtggaagcgcgtcaacacccttatgcactacaatgtccgggatggagccaccctcatcctgtccaaggtgggggtctcccagcagccggaggacagccagcaggacctgcctggggagcgccatgccctcctggaggaggagaaccgggtgtggcacctggtgcggccgaccgacgaggtggacgagggcaagtccaagagaggcagcgtgaaagagaaggagcggacgaaggccatcaccgagatctacctgacgcggctgctctcagtcaagggcacactgcagcagtttgtggacaacttcttccagagcgtgctggcgcctgggcacgcggtgccacctgcagtcaagtacttcttcgacttcctggacgagcaggcagagaagcacaacatccaggatgaagacaccatccacatctggaagacgaacagcttaccgctccggttctgggtgaacatcctcaagaacccccacttcatctttgacgtgcatgtccacgaggtggtggacgcctcgctgtcagtcatcgcgcagaccttcatggatgcctgcacgcgcacggagcataagctgagccgcgattctcccagcaacaagctgctgtacgccaaggagatctccacctacaagaagatggtggaggattactacaaggggatccggcagatggtgcaggtcagcgaccaggacatgaacacacacctggcagagatttcccgggcgcacacggactccttgaacaccctcgtggcactccaccagctctaccaatacacgcagaagtactatgacgagatcatcaatgccttggaggaggatcctgccgcccagaagatgcagctggccttccgcctgcagcagattgccgctgcactggagaacaaggtcactgacctctgacctacaatctccagtgctgccttgggacataggtacctgaggtacctgagagcccctcaggggaggaggccgagtggctgtggctgaggcccccaccctcccctggaacgcgccccaagccggagtgggtgcagccggaacccgcccagcgtctagactgtagcatcttcctctgagcaataccgccgggcaccgcaccagcaccagccccagccccagctccctccggccgcagaaccagcatcgggtgttcactgtcgagtctcgagtgatttgaaaatgtgccttacgctgccacgctgggggcagctggcctccgcctccgcccacgcaccagcagccgcctccatgccctaggttgggcccctgggggatctgagggcctgtggcccccagggcaagttcccagatcctatgtctgtctgtccaccacgagatgggaggaggagaaaaagcggtacgatgccttcctgacctcaccggcctccccaagggtgccggcactctgggtggactcacggctgctgggccccacgtcaaaggtcaagtgagacgtaggtcaagtcctacgtcggggcccagacatcctggggtcctggtctgtcagacaggctgccctagagccccacccagtccggggggactgggagcagttccaagaccaccccacccctttttgtaaatcttgttcattgtaaatcaaatacagcgtctttttcactccg

SEQ ID NO: 5617 - DNA, 2922 bp, Homo sapiens; identical to SEQ ID NO: 965

SEQ ID NO: 5618 - DNA, 371 bp, Homo sapiens
  misc_feature (1)..(371): n=a,t,g or c
gatctggttaagttgtgtagtaaagcattaggagggtcattcttgtcacaaaagtgccactaaaacagcctcaggagaataaatgacttgcttttctaaatctcaggtttatctgggctctatcatatagacaggcttctgatagtttgcaactgtaagcagaaacctacatatagttaanatcctggnctttcttggtaaacagattttaantttctgatataaancangccncaggagaattcggggatttnaggttcncngaatagcctatatatggtgcatcggntaggtcnttattgattttttgacccttttcggctttacctnatgggaagacccngttcntttttaaatnatccnggtttttg

SEQ ID NO: 5619 - DNA, 276 bp, Homo sapiens
  misc_feature (1)..(276): n=a,t,g or c
gatccgctacagcaacgtgaagaagctggaaatnaagccaaagtacccgcactgcgaggagaagatggttatcatcaccaccaagagcgtgtccaggtaccgaggtcaggagcactgcctgcaccccaagctgcagagcaccaagcgcttcatcaagtggtacaacgcctggaacgngaagcgcagggtctacgaagnatagggtgaaaaacctcagaagggnaaactccaaaccngttgggagncttgtgcaaaggnctttgcagnttaaaaaaa

SEQ ID NO: 5620 - DNA, 382 bp, Homo sapiens
  misc_feature (1)..(382): n=a,t,g or c
gatctctggtcagagtgaactcttgcttcctgtattcaggcagctcanagcagaaagtaaggggcagagtcatacgtgtggccaggaagtagccagggtgaagagagactcggtgcgggcagggagaatgcctgggggtccctcacctggctagggagataccgaagcctactgtggtactnaagacttctgggttcttnccttctgctaacccagggagggtcctaagaggaaggtgacttctctctgtttgtcttaagttgcactgggggatttctgacttgaggcccatctntccagccagccactgccttctttgtaatattaagtgccttgagctggaatggggaagggggncaagggtcagtctntcggggtnggn

SEQ ID NO: 5621 - DNA, 344 bp, Homo sapiens
gatcaagggcaatgccaatgacatcggcatggattatgattatgccctcctggaactcaaaaagccccacaagagaaaatttatgaagattggggtgagccctcctgctaagcagctgccagggggcagaattcacttctctggttatgacaatgaccgaccaggcaatttggtgtatcgcttctgtgacgtcaaagacgagacctatgacttgctctaccagcaatgcgatgcccagccaggggccagcgggtctggggtctatgtgaggatgtggaagagacagcagcagaagtgggagcgaaaaattattggcattttttcagggcaccagtgggtggaca

SEQ ID NO: 5622 - DNA, 466 bp, Homo sapiens
  misc_feature (1)..(466): n=a,t,g or c
gatcccatggctttctttactgggctctggggccccttcacctgtgtaagcagagtgctgagccatcactgtttcagcaccactgggagtctgagtgcgattcagaagatnacgcgggtacgagtggtggacaacagtgccctggggaacagcccataccatcgggctcctcgctncatccatgtctataagaagaatggagtgggcaaggtgggcgaccagatactactggccatcaagggacagaagaaaaaggcgctcattgtggggcactgcatgcctggcccccgaatgacccccagatttgactncaacancgtggtcctcattgaggncaacggggaaccctntnggngacangtattnaagacacngtncccacctaggctgtggnagggtgaagggcgagttttcccaagntggtgggccttngttnaganctttgtgttgngtttggnncnngnta

SEQ ID NO: 5623 - DNA, 2409 bp, Homo sapiens
atgcggggcgtgtggccgcccccggtgtccgccctgctgtcggcgctggggatgtcgacgtacaagcgggccacgctggacgaggaggacctggtggactcgctctccgagggcgacgcataccccaacggcctgcaggtgaacttccacagcccccggagtggccagaggtgctgggctgcacggacccaggtggagaagcggctggtggtgttggtggtacttctggcggcaggactggtggcctgcttggcagcactgggcatccagtaccagacaagatccccctctgtgtgcctgagcgaagcttgtgtctcagtgaccagctccatcttgagctccatggaccccacagtggacccctgccatgacttcttcagctacgcctgtgggggctggatcaaggccaacccagtccctgatggccactcacgctgggggaccttcagcaacctctgggaacacaaccaagcaatcatcaagcacctcctcgaaaactccacggccagcgtgagcgaggcagagagaaaggcgcaagtatactaccgtgcgtgcatgaacgagaccaggatcgaggagctcagggccaaacctctaatggagttgattgagaggctcgggggctggaacatcacaggtccctgggccaaggacaacttccaggacaccctgcaggtggtcaccgcccactaccgcacctcacccttcttctctgtctatgtcagtgccgattccaagaactccaacagcaacgtgatccaggtggaccagtctggcctgggcttgccctcgagagactattacctgaacaaaactgaaaacgagaaggtgctgaccggatatctgaactacatggtccagctggggaagctgctgggcggcggggacgaggaggccatccggccccagatgcagcagatcttggactttgagacggcactggccaacatcaccatcccacaggagaagcgccgtgatgaggagctcatctaccacaaagtgacggcagccgagctgcagaccttggcacccgccatcaactggttgccttttctcaacaccatcttctaccccgtggagatcaatgaatccgagcctattgtggtctatgacaaggaataccttgagcagatctccactctcatcaacaccaccgacagatgcctgctcaacaactacatgatctggaacctggtgcggaaaacaagctccttccttgaccagcgctttcaggacgccgatgagaagttcatggaagtcatgtacgggaccaagaagacctgtcttcctcgctggaagttttgcgtgagtgacacagaaaacaacctgggctttgcgttgggccccatgtttgtcaaagcaaccttcgccgaggacagcaagagcatagccaccgagatcatcctggagattaagaaggcatttgaggaaagcctgagcaccctgaagtggatggatgaggaaacccgaaaatcagccaaggaaaaggccgatgccatctacaacatgataggataccccaacttcatcatggatcccaaggagctggacaaagtgtttaatgactacactgcagttccagacctctactttgaaaatgccatgcggtttttcaacttctcatggagggtcactgccgatcagctcaggaaagcccccaacagagatcagtggagcatgaccccgcccatggtgaacgcctactactcgcccaccaagaatgagattgtgtttccggccgggatcctgcaggcaccattctacacacgctcctcacccaaggccttaaactttggtggcataggtgtcgtcgtgggccatgagctgactcatgcttttgatgatcaaggacgggagtatgacaaggacgggaacctccggccatggtggaagaactcatccgtggaggccttcaagcgtcagaccgagtgcatggtagagcagtacagcaactacagcgtgaacggggagccggtgaacgggcggcacaccctgggggagaacatcgccgacaacgggggtctcaaggcggcctatcgggcttaccagaactgggtgaagaagaacggggctgagcactcgctccccaccctgggcctcaccaataaccagctcttcttcctgggctttgcacaggtctggtgctccgtccgcacacctgagagctcccacgaaggcctcatcaccgatccccacagcccctctcgcttccgggtcatcggctccctctccaattccaaggagttctcagaacacttccgctgcccacctggctcacccatgaacccgcctcacaagtgcgaagtctggtaaggacgaagcggagagagccaagacggaggaggggaaggggctgaggacgagacccccatccagcctccagggcattgctcagcccgcttggccacc

SEQ ID NO: 5624 - DNA, 457 bp, Homo sapiens
  misc_feature (1)..(457): n=a,t,g or c
cgtcatacaatcttggagtcctgcatttggatggcatcttccctggagttcctggaaggaatcaaactttagctggtgaatatttccataaggctgcgcaaggtggacacatggaagggaccttgtggtgttctctctactatatcacaggcaacctggagacattccctagagatcctgagaaagctgttgtatgggcaaaacatgtagctgagaaaaatggctacttgggccatgtcatccgcaaaggcctcaatgcctacctgggaaggttcatgggcatgaagctttgctgtattatgttttagcagcagaaactgggaattgaagtgtcacagacaaatttagcacacatctgtgagggagaggccagacctggccaggggagatantttgggtntttaactntgttttgggagattantattaatttcntctgttttttcaaatccgatgg

SEQ ID NO: 5625 - DNA, 411 bp, Homo sapiens; identical to SEQ ID NO: 677
  misc_feature (1)..(411): n=a,t,g or c

SEQ ID NO: 5626 - DNA, 462 bp, Homo sapiens
  misc_feature (1)..(462): n=a,t,g or c
gctggggcttagctgggaggtggtctgaagcagacagggaatgggagaggnggatgggaagtagacagtggctggtatggctctgaggctccctggggcctgctcaagctcctcctgctccttgctgttttctgatgatttgggggcttgggagtccctttgtcctcatctgagactgaaatgtggggatccaggatggccttccttcctcttacccttcctccctcagcctgcaacctctatcctggaacctgtcctccctttctccccaactatgcatctgttgtctgctcctctgcaaaggccagccagcttnggagcagcagagaaataaacagcatttctgatgaaaaaaaaaaaaaaaaaaaccgcggccgaaagcttattnccctttaagtaaggggttaatttttagcttgggcactnggccntcgttttanaacgtcgtgaattnggaaaacc

SEQ ID NO: 5627 - DNA, 2088 bp, Homo sapiens; identical to SEQ ID NO: 704
  misc_feature (1)..(2088): n=a,t,g or c

SEQ ID NO: 5628 - DNA, 458 bp, Homo sapiens; identical to SEQ ID NO: 1038
  misc_feature (1)..(458): n=a,t,g or c

SEQ ID NO: 5629 - DNA, 1574 bp, Homo sapiens
ctctccctccttgcgcgttccgggtctcgcaagcgcctccaaggtttgtcttgaagcatagctccagctggagggtaccttttaagctgttcaaggtcaagatgaatacaaactcaaaggaggttttatccctgggtgttcaagttcccgaggcatgggaagaacttctgacaatgaaagtggaagcaaaaagtcaccttcaatggcaggaatccagactgaaacgcagtaatccactggcaagggaaatcttccgaaggcactttcgacagctgtgctaccaagagacccctggaccaagggaggctcttactcgactccaggaactttgctaccagtggttgaggccacatgtgagcacaaaggagcagattttggatctgctggtgctggagcagtttctatccattctgcccaaggagctccagggctgggtgagggaacactgtccagagagtggagaagaggctgtgattttgctggaggatctggagagagagctcgatgaaccacaacatgagatggtggcccacagacacagacaagaagtcctctgtaaagagatggtgcctctagcagagcagacaccactgacccttcagtcccagcctaaggagccacagctcacatgtgactctgctcagaagtgccattctattggagagacagatgaagtaaccaagactgaggacagagagttggtgctaaggaaagactgtcctaagatagtggaaccacatgggaaaatgtttaatgagcagacctgggaggtatcacagcaggatccctcacatggagaagttggtgaacataaggataggatagagaggcagtggggaaacctcttaggagaggggcaacacaaatgtgatgaatgtgggaagagctttactcagagctcaggtctcattcgacatcaaagaattcatactggagaaagaccttatgaatgtaatgaatgtgggaaagccttcagtcgaagttctggtctttttaatcaccgaggaatccacaatatacagaaacggtaccactgcaaggagtgtgggaaggtcttcagtcagagtgcgggtcttatccagcatcagagaatccacaaaggagaaaagccgtatcagtgcagccagtgcagtaagagctacagtcggcgttcatttctcattgaacatcagagaagccacacaggggagcgacctcaccagtgcattgaatgtgggaaaagctttaatcgacactgcaacctcattcgccatcagaagatccacacagtggctgagctggtctagggcttggctatgagcaagttttccagatcaccacccaagttgtgtggggcaggttgagactagaaaatgcctctttcttcctttctccatgaaatgtgtttgaaacaaatcctgacttaaggcccagggacttccttaaaggaaagttgggtgtttgaagctactgttttctcttttgttcactttacctctttcttactcttactagctgtgtccctcttatttataatttatttatttttttgagatggctgctaaacccttctaataatataataaatggcactg

SEQ ID NO: 5630 - DNA, 480 bp, Homo sapiens; identical to SEQ ID NO: 5310
  misc_feature (1)..(480): n=a,t,g or c

SEQ ID NO: 5631 - DNA, 386 bp, Homo sapiens; identical to SEQ ID NO: 4929

SEQ ID NO: 5632 - DNA, 427 bp, Homo sapiens
  misc_feature (1)..(427): n=a,t,g or c
gataaaagcagggttggcctcagcctgtggtctgtctcatgctctccctgttcctctccccgccaccccagggcctccaagccacctctggaaatacttggctctgcccatgcacngcggaggggcgccacgtgcgagctgtggaattgggccccgtggcagagccccatcccttggggntcgtnggggatgcgcccaagcccccgagggagaggcctggggacaccaacaaatctaagccctccctagctgcttggtaactgtgtcatgaagctgccggacagacacacgtggcatctccctgggcaggagagcaggcctgcagcatgggtcctgttcccgtgtgccgtgggtggcagtggctgcacctggcactagggctgctctgtggatgtgggtnacaacggcaggaggggatgctggcctt

SEQ ID NO: 5633 - DNA, 327 bp, Homo sapiens; identical to SEQ ID NO: 511

SEQ ID NO: 5634 - DNA, 476 bp, Homo sapiens
aggcggtggtgttcgtcttctctctcctcgattgttgcgcgctcatcttcctctcggtctacttcataattacattgtctgatttagaatgtgattacattaatgctagatcatgttgctcaaaattaaacaagtgggtaattccagaattgattggccataccattgtcactgtattactgctcatgtcattgcactggttcatcttccttctcaacttacctgttgccacttggaatatatatcgatacattatggtgccgagtggtaacatgggagtgtttgatccaacagaaatacacaatcgagggcagctgaagtcacacatgaaagaagccatgatcaagcttggtttccacttgctctgcttcttcatgtatctttatagtatgatcttagctttgataaatgactgaagctggagaagccgtggttgaagtcagcctacactacagtgcacagttgaggagccagaa

SEQ ID NO: 5635 - DNA, 352 bp, Homo sapiens
  misc_feature (1)..(352): n=a,t,g or c
ctnntttttttttttagactgattctccctctgtcaccaggctggagtgcagtgggcaacagagtgagactccgtctcaaaaaaaaaaaaaaaaccaaacccgtatgttcttttaatttatactatgtatacatttttcttatattagcttagtagttcttagaaaagaaaacctcattaatttgaatcttcttatatgcaatctgngattattcagacagggtgaagctgaaatttacatttaaattataaattttaaaatgtttgcagtccaattgaatcctataaggtaagagtctagaaaaaagttattaaaaaataaacattttaagtgctttaaaacacacacttg

SEQ ID NO: 5636 - DNA, 456 bp, Homo sapiens
tagttatagagctaattggcttttatttgtgatttatgaattaaagcagcaccactctacaagtacagtgatagctccccctgggcaatacaatacaagaacagtgggttttgtcaaattggaacaaggaaacagaaccacagaaataaatacattggttaacatcagattagttcaggttacttttttgtaaaagttaaagtagaggggacttctgtattatgctaactcaagtagactggaatctcctgtgttctttttttttttaaattggttttaattttttttaattggatctatcttcttccttaacatttcagttggagtatgtagcatttagcaccactggctcaatgcgctcacctaggtgagagtgtgaccaaatcttaaagcattagtgctattatcagttaccaccatttgggggcttttatcccttcatgggttatgatggtc

SEQ ID NO: 5637 - DNA, 429 bp, Homo sapiens; identical to SEQ ID NO: 3034

SEQ ID NO: 5638 - DNA, 552 bp, Homo sapiens
  misc_feature (1)..(552): n=a,t,g or c
tttttttttttttttttaaagttaaagattcttttattaataaattctccctcccctccaaactctccccaaaataaatatctcctccccgctttggggagttgggggggtctgtatcttagggccagccctcctagtgggccagcnccctagtgttaaaaataggtccctaaccccccagggtgacccccgtggtggaatttcaggacatctgagtgagtggggcctagtgtcaagtctgccccccaagtcagcctggcccccaggntcctaaggaaggagggcacccccctcccctgtgcaaatgctgcagttccttagtcagtgtcagctgttttgtgtgagccagcgtgaggctccctttctgttctggagccagaggagnggcaaccagacancttggaaggttcccctgaaccctgggcccaggctncggaggtgattcacgccccnaaaccccttgtggttggaggagcttggctccggccgcgtctgggaggcagagaantgggctctagaatggatgaatgaatgatgaatgggcnagcccgg

SEQ ID NO: 5639 - DNA, 325 bp, Homo sapiens
tttttaacataagtataaatttactatccacctagtggtagctaggtaaaattgcaggcataaagataaaaaagaaatcatcaactttgtagttcctcagcttcaaacccaaacctgcaagggagaggagagacccagacgcctcagggaccaggcagataatacaaataaatgaaacaggccaggtgagagagtacaagtcttgccaaaagaagaaacccctacttagtttcaattgattgtcctcttctgaaaatgcagatcagaattgccacacattctgaccgatcgagagaggccagaaattctaattttactcgtgccg

SEQ ID NO: 5640 - DNA, 401 bp, Homo sapiens; identical to SEQ ID NO: 893

SEQ ID NO: 5641 - DNA, 154 bp, Homo sapiens; identical to SEQ ID NO: 3801

SEQ ID NO: 5642 - DNA, 401 bp, Homo sapiens
tttttacgaaaccaggtttattaaaatttctctacaagtcagaaacggccatctcactgttcacatatatacacgtatgtacaggaagaacctagtgtttctagctttcccggcagaaggccctgccagcccagagtccttagtcggataatgtatcacagatacaacagtcgagcaaccacgagagcgttagtgcgacagaggcctctgtcctccctcttctcaaagtcccatgattctgtcaaggtaatattgccaataatcattcacatttcacgtggttttagacacgcaggttattcagacagacacagacaacaaaacaagcctcaaagccagaacaaaacaaaacaaaaccaaatcgaacataggtataaaaggtaaaatatatgtacaaagta

SEQ ID NO: 5643 - DNA, 376 bp, Homo sapiens; identical to SEQ ID NO: 579

SEQ ID NO: 5644 - DNA, 382 bp, Homo sapiens
ttctctttgtccagttcctttattgggggcagggcaccaagaagaggccctccgctccccaaacccagaggcaaaaggggttggcacgctccctcccagcctagtccttgcgtcactgtccatgggcaattcctctgccctgcatcttcaggccatgtcaggtagaggtatccatctcagggacctcagtggacacttccgtgggcactgccagccgcctggggggcacataggatcccatacccgctgccctctccgcctcttcctgactgtagggctcgacgctcagctgcttcagccttttcttgtggtctttggatcggaagtgggtcttcaggttggtggaatcgatgaagtacctcgcgcaggccagacagcggtg

SEQ ID NO: 5645 - DNA, 316 bp, Homo sapiens
ttttttttttttttttttttttttttttttttttctgttacaaacaggtctttattaaagatgagaagccaggtctttattaaagatgaggagggggcaggaaaggggggcagtgctcctctacccactgcctttgcctgcccggggtgagggagcccctctgctccacccatgccccccatgatggcacatctgtatgaggctgaggcatggggggcagtgtgaagaacaggggcaggttccaagaaaaagaagaaaaacccttcccacagccctaataaataacagaagggtttgggatgacctgggcacaggc

SEQ ID NO: 5646 - DNA, 457 bp, Homo sapiens; identical to SEQ ID NO: 1519

SEQ ID NO: 5647 - DNA, 283 bp, Homo sapiens
gcagccgcctcctaagaacctgctgctgggtcccggcaagcccaaggagccagctgtggtgcggccgaggagcctgtggcagcggcacatggcatgccagaggtaaaaaaacgacggcggcggaacagaagctggcatctccccagccatcctatgcagcagacgccaacgacagcaaggccgagtactcagacgtcctggccaagctggcttcctgaaccgccagagccagtgcgctggacggtgctcaccgccccgctgctggacacccagtgagccggag

SEQ ID NO: 5648 - DNA, 404 bp, Homo sapiens; identical to SEQ ID NO: 603

SEQ ID NO: 5649 - DNA, 317 bp, Homo sapiens
tttggtcttttatggtcgattttgtcttttttcttcttttttccccattttttcaaggatggaaaggtcagagaaaaataaaataaaacatctttcaatagtctttcctggtaaaagcagcgtctctctgggctggggagtaaagggtgtggggcaaggggagtggggagaggctgaaaccttcccccaaaccccagttttagatcctttggtttccttctcccagaagatggcagaagggcatggtgggaacagcagggagaaaatatggtgatgacaaaccccagatgatcaaggggctgatgctcctggggccc

SEQ ID NO: 5650 - DNA, 265 bp, Homo sapiens
ttttttgagctttggacaaatttattgaaacatacaggcggctgttagcagagaaatcattccatgattgatgtgttacatttggccactaccttgaatgtataatttaaaaattatatttttcacaactaagcctttggccaaaaaagtcatttagcacatctttaaagatcaataagaaatggattttggacattaaaaagatcaagtcactgaattaaacagtagcaacccccattaatctagaatcccatagtgctgaagg

SEQ ID NO: 5651 - DNA, 405 bp, Homo sapiens
ttaaattaaaaaacaatttattgaaaaagagtaatgctttatacaaattcccattataaaaccccaaaatgtctattggtctgtttccaggtgtggtagaagaatataaaaagatcaaaattggataaattctattgtaacaatttcgttggtcattttgggccataaaatttttttgtaatgtttggtaactgatatccacatggaattacactcacacatcatgaagatctatgtatgtggcaaaagccatttaaattttaacttccaaaagcatatattctcaggtttggaaggcacactaaaatttattaggtccaattcctcataagacacggtggctgactttccttgtgtagtttattatgaagtaccatttccaaactaactatcctagcagcgtca

SEQ ID NO: 5652 - DNA, 380 bp, Homo sapiens
ttttttttcttgttagctggatatatttctgttttttctttttttttctttttttttttttttttttttgtcacagaacactgtttgcagtagaggaaactggcattgcagtctggtggtataatggcttgtccacataaaccagtacatgttcatcctttagcgcaaaaagccctaatggcgcgtaccctattaaaattcaggacatctccaatattctctctctctgtttttctttgtcatcttttttttttttaaataaacattttcaaggtttgtccaaaagaaggccatataggttcttggctagcggaagacaattcagaacagctgttgcacacttggactgtcaccttctccaggctggcagttgatatctt

SEQ ID NO: 5653 - DNA, 355 bp, Homo sapiens
aagtgcttaagatggtgtttaatacagcagggagccaagatacagtagtaggacacagtaaagaatgtggagtgtgtagatacaataaagaattcattttatgatctgccacctgttacttgacagaggagtaagttagggaaataaatgactcagttcttcatacatgcaaaggtaagttagttattacaaaagtttttgctgttgtttgtgctgaaagaaaagcatatgcatttaaacattttttaaaaaataaatcactcaataggcttaagaaaaatactttagttcatagttcattgatctgacgttttgatttaagatcaggggatgaatccaggatgaaaaccaaaga

SEQ ID NO: 5654 - DNA, 481 bp, Homo sapiens
tttttttcataagtcagaatttatttcataccatctcacttatagcattttcaagtacaacattctgctcaacatcatttacacttgaaaacagaaaagcacaacttggtaaggcaccaggttacgatagtctggagagaaggccttgctcccattttggcttgtgtaatacctgggtagtttctcttgagtctgtcaagcagagaacaaggttataaaaggtccatttatacatacatggtaacaagagataacaaacagttttgaagtatgctgtatttataaattataatggtggcctacacttgtagttcagccaaagtggcattctctaaagcaaaattcttataaaatcttctctgcaataccaagctgcaagtttaacaattttttagctttgaagtgaaccaactttatatttaactcaaacacatactttaaaaacattttcggccccaaactctatgttcacgaagaaata

SEQ ID NO: 5655 - DNA, 366 bp, Homo sapiens
ttttttttttttttttgagtattccagcattatttatttgatcagagtaaaatacacttcccatcactacaaactgagcacaactacagttgtctacacattcatatttttgacgtgccaacattttgcattctacatgaaacatttggtttaaacaaaatcttaagaattctctattttgtttcccatcttccctcctgttctctcccatcctccaaagatgttttatattaactgctatgagatttatttgccggtcacgtaatacggaggacagcagggaacaacacaagatttaccatgcctaggggatgaatggcaaacccaactttggctaatgtcattgagaacaacttggaagcgtga

SEQ ID NO: 5656 - DNA, 534 bp, Homo sapiens
attgatataaaacagctttatttgagggtcctagtctgtgaggggtggacagataaaagaggtatttgtgatagggcatgaagaccttaagaccctgagggtgctgtgaacagggaacagtctgatatctggaaccaaagggcaaggaaaggtcctggggctgaagtggggacaaggggcaccaaaaagccagtgggggcaggtggtgctggccaaggtcagaggcggatgcaacaggccctcttctccccagggccaggctcctgtccagcctgggcactgccagagggtgatggcattggtccggatgctgttctgtctctgcttggacaccttcgcaaagatttctttcaggacagtctcaaaggctagctgcaacattggtagagtccagggctgaggtctccaggaagagcagtccattgttttcagcgaacattcgggcctcctcagtgggcacttcccgggcctggctgaggtcacttttgttaccccgagcatgacgacgatcgtggcttcagcatggtcatagag

SEQ ID NO: 5657 - DNA, 318 bp, Homo sapiens
gtgaacaataaagctttttaatcacctgggtgcaggtgggctgagtccaaaaagagtcagcaaagggtggtgggattatcattagttcttgtaggtttgggataggcggtggagttaggagcaattttttgtgggcagggggtggatcttacaaagcacattctcaatggcggagagaatattacaaaataccttcttaagggtgcgggggtgcgggcgtggggtgggtggggagaatattacaaagcaccttctcaagggtggggaaggtgtattgtcacaaggtcaattgatcagttagggtggggcaggaacaaa

SEQ ID NO: 5658 - DNA, 601 bp, Homo sapiens
ttttttttttttttttttttttttttttttttttttttttgagcttggcaaaccttttttattttgtgataaaaatgctttcatataaatttcatcttaactacctttagaatgaaacggaaaagtaaaaacaaagtgtgcattttccttactacgtttagtcaggaatatgcggtcattttattggttactgggtttctcatacaaacagatataatatcacttttaagagaaatgtacacaaggaagtaaccatagtaccacttattagtgggggcctctgggtacataaatgtgtcctcccaaatagtcatcatacattcaatgtattggttagggccaaaatccctaaaccacctctcaacaaaacattacacctttggtcctttattatgcaaaaattacaaattggcaaattcaataagaggatgcaatggatttgagcatcacagccaattgcttatactaaaatattttaattctcagactctctttccctcatacctttcccttccccacctcacataagaaaatgatgcttaaaacaaaacagaggaagcaattatacaaacaaaaaaacctatccccaaaggcgggcaga

SEQ ID NO: 5659 - DNA, 4003 bp, Homo sapiens; identical to SEQ ID NO: 1013

SEQ ID NO: 5660 - DNA, 4003 bp, Homo sapiens; identical to SEQ ID NO: 1013

SEQ ID NO: 5661 - DNA, 237 bp, Homo sapiens
gtcagtttacacatacatcatgttaatattagaccaaggcacaaaacgtttagtgcataaacccagtttcttttaagatttagcattttattttagtctcttatcttagtttggaccacttgtacccagtactctacctactacagactatttaacttacccaacaaaatcaaaagaggttgctgaccagatttataggggacataactgtttatattatcaaagtgtttgcataac

SEQ ID NO: 5662 - DNA, 195 bp, Homo sapiens
  misc_feature (1)..(195): n=a,t,g or c
ggtagtcaaagtaaaggtttatccttgcatcagaatggtttaaatcttgcaatttgcatatacaaagagttcagcaacattcactggcattataatcagagcaagatcaanttataantgtaatcaaagaaaatatgatagttgaaactgtaataacatacatacattataaagactgcacataagttaaacaca

SEQ ID NO: 5663 - DNA, 358 bp, Homo sapiens
  misc_feature (1)..(358): n=a,t,g or c
gatacatatatttattatgctgtaaaaagcaacactacctgattgcatttaaaataaatgtttcccaatttcagaatacttacaacttgtagttttaagattagattcactttgggaggttttagaagcaaatacattcatagctgtgtaatccccaggaagaatctaaatctgacatcaggtcattcagtccctgccagacagacaacagcatcaaatggtcaacagctaatccagctctgcagctaaagggcagtgtcgggcagcagtggggtatagcatattaccaaagatgagaccagcaaaaacaacaatgtgtataaagctttaanttaacatgatcatatagagcgctcag

SEQ ID NO: 5664 - DNA, 311 bp, Homo sapiens
acaacactgtaagttttattcagttcaaatatcacatattagatatacaataccaattaattgaaatgaacagtacaagaatacatgaagtaaatatcataacatttaagtttcgtctcacttaggcaacaagaaatgctgagtagtattattacatattcaaaccagacttaaacttcagaaacagaaggccagatgagtgacctgtatcacaggatatgacaacacatcacctatctccaaacaagaaaaagcatgattattaagtttatctacaccagcttatttattcaaatttgctcttcttatta

SEQ ID NO: 5665 - DNA, 315 bp, Homo sapiens
acttccttcactagttacgacaaaatttaagaggaataacaaatacaaattttctgttaagaacggaaaggtgcaaactagcagagtcaatactggtaaccagaaggcactaatccaaacacataaatttcaaaagctggttatattatggaataccatatatactggcctttgccagtttgggatttctgcaatagcaataagcctcgtttctgtttccaattataacaacaaaaagatgagttactaatgaacattccacttacagaagtctaggctatgttgataaattgaaaacttatctagactactctg

SEQ ID NO: 5666 - DNA, 267 bp, Homo sapiens
  misc_feature (1)..(267): n=a,t,g or c
aaggcttctggtagggacattttattttttggtaaagccacaatagatagaaatgccataaaaacaaacatgtaaacaaggtatcagaactttggttcactgaaacatctcacacctaaaacacctgnggtacaaaggcaccttgctaggcgctagacagctaactctgctgcagccactttgatcctagccttggggccagggatggcacaggctgaatggaagggctgggacttcagtcacacaggagtcgccctagtatggtct

SEQ ID NO: 5667 - DNA, 247 bp, Homo sapiens; identical to SEQ ID NO: 5203
  misc_feature (1)..(247): n=a,t,g or c

SEQ ID NO: 5668 - DNA, 372 bp, Homo sapiens
  misc_feature (1)..(372): n=a,t,g or c
ttttttttttttcacagtgagcattaaattattattccatacagccctggccctggcccttcttgagggagtggggtttntggggtntgcccagcagggatcctgccagatgatgtccacatgagaaggcaggtgtccaacagcttcagcttcacccagtgccccccagacaaataatgacaagtccagggtcttctgatgtgtcaggccagcactccccttgctgatgggaaaaccggggctcggccagccccactgcatcccctcacatgatgatacgaggctctngcactgactcgccaatagacttgtggggcagcangctggctccgttgaggtaggagctcatcattaactattgacgtcctncac

SEQ ID NO: 5669 - DNA, 501 bp, Homo sapiens
  misc_feature (1)..(501): n=a,t,g or c
tttttttttccttctgtagtcgtctttatttagagcagaattcagactcagctggtatcccccagggcaaccccaggatgggganagggctggtctgtccccacccacttctccaggatcctcccagcccccaggctgncttttccctccaactgtcagctgcttagctgctcatctggggattggagctggagcatctgtcaaggttgtctccttgacaaacagcttcctctttggaaatggcttcactcaggtcctgcaggtcatcgagcaggacagagagggacccggggaaggaagacagcagatgagcaccagacaagggaaggtgctcgtggttacagagggaaacagggttgggcacagggaaatgagggaatggggagagagggaggctctttgggtccaagctggggcatcncttaaaagaggtttaagggtntcgaaggaccncagagaacaacattcttcntgcgagatttttaagagggagttttctna

SEQ ID NO: 5670 - DNA, 231 bp, Homo sapiens
ttttttttgcttttataaacattcaaccaacatgttctttaataatctcttctttaaagaacaaaataatcaagtacatggcattaagttaaatgtctctgcacatgaatttccaccttataaatctggtatattaaattgtgctgtaaatagatttgtatattttcttttttgagtactatgataggtgaaatggtatgactataaaaaggatttgtttctttttgtctc

SEQ ID NO: 5671 - DNA, 292 bp, Homo sapiens
tttaatgctaaaagttaaagaaaaaaaggtactgtaaatctgacaaatgacagaattcaggtgatatttccatagcgtgattttaaaatataataatgttgatatctgagattacactcacttcagttgacatgagtttcatcatatatagaaaaagtatcaccttcaacttaaaaaaagtaaaggttaaaaggtggcacacttttaaaatacttggtggccaaggaaaggtatatagtaaaagttgtaaaccatgtgtatgttctcataactttaaatgtgaggccacatg

SEQ ID NO: 5672 - DNA, 375 bp, Homo sapiens
  misc_feature (1)..(375): n=a,t,g or c
tcacgtgtgcacagcttttttacaggttacaaagtgtttcacatacatcatctcatcaattcctcacaacagccctgtgaggtaggcagggcagggggtaatgttcccatttgtacagatgtggagactgaggcccagagaggccagtgacctgcttgaggccacacagcaagtgagcagcagagctgggnaccagaggctggggtgggccccacctccagcccctggctctntccactgactgtgctgtcccccaggaggaccccagcctntgtccagagtntcagccacanccaagccaggntcccaccccttgcagtgggtgccgcctgggaagccccagaagacaggtttcccacccccattcgggaagac

SEQ ID NO: 5673 - DNA, 438 bp, Homo sapiens
  misc_feature (1)..(438): n=a,t,g or c
gactttnntccccacctttatttttcatgttataaaagtgcacattcaaggaaaagtacacagaaggaaggagacacctcatgacgaccccagtatgcagtctgggacatgtnttttcaganctgattctgtgaatatttcattttttatgggtagggtcacatacatatatatttttttccttccttttgtcatttaacatcctatagcctaaatgttcttgaataatactgacaattctgtctaagtatcatttttaataggtttgtaatatcattgtgggctggccgtgggtggctcatgcctgtaatcccagcactttgggnaggccaaggtggggtgggntcatctgagggtcagggcgttcaagaccacggctgggccaacatgggngaaaccctgtncttctaggnaaaaataccacaaaaattnggccgg

SEQ ID NO: 5674 - DNA, 391 bp, Homo sapiens
  misc_feature (1)..(391): n=a,t,g or c
ncagaaacattttattgacaacagttcccaacagagtctttggggtctttaagtggcaggtgcagcgtccacaggcagagtgagggctcctgaggaacctcaccccaaattccctaaccggccgaggacgcanccccaggcccctctcaggtgggcatggcagtcccggcagcaccccctctgagcagcctgctgtggggaagaagccgggccggaagcctcagtcgtggtgccagcccagctcatgctccccgccccgaggcccccagcctntgggaagcccctgcctntaagggacagctcgtgaagacacaggaacagtggttgggggtgagggtctagggaattggggcagagggtngcttnagcacanacctgacttccctgggag

SEQ ID NO: 5675 - DNA, 404 bp, Homo sapiens
  misc_feature (1)..(404): n=a,t,g or c
taatctttttcttgctcaattcccttgactatttcacaatggaaataaaaaagaagttcttaggaccaaatcttctataaccttattacacaattgggttatttctattattttttaaatatatggaaaataatcttcataagttccctttctcccaaatagtatattgtaaatattcttatacaattaaagatgggtcagaaaaagaattctacaagaagtaaccctaaatgaaccctagtctacataacaaaagatgtacaatggtcagagatggcctgactgagggtgtcgggtaatttgggtaatgctggttcacaggnaatgatggttctaaggggctgcagggctgggngagagtacccgacacccctctctgtgggagggccnctttctagtnaatg

SEQ ID NO: 5676 - DNA, 262 bp, Homo sapiens; identical to SEQ ID NO: 4388

SEQ ID NO: 5677 - DNA, 478 bp, Homo sapiens; identical to SEQ ID NO: 1016
  misc_feature (1)..(478): n=a,t,g or c

SEQ ID NO: 5678 - DNA, 429 bp, Homo sapiens
gctttcatataaaaatgtactgtagtaatcagtaagaaaaagaaacaacattggctaagtcacgaataggcatttcaccatatgtacatgataaatggccaatcaaaataaggaatggggctcattctgctggaaattaaatacattcaaacaagaacagagatccattagcaaaatgtttaaaaataatatcacagggttaccaggggtatgacaaaaatggacacttccatacacactaggtgaatatattggtgaaaatagttcagataaacatacaaccatgtatgtaaaagtatttatcatcaatgcattatttgtagtagcaaaaacaacaagcagccttgtgaaaccagtttaatgtcctcagcagggaattaataatattattgtatattcatgaaattgacaccatgtggccacacaaat

SEQ ID NO: 5679 - DNA, 503 bp, Homo sapiens; identical to SEQ ID NO: 3422

SEQ ID NO: 5680 - DNA, 467 bp, Homo sapiens
  misc_feature (1)..(467): n=a,t,g or c
ctaaaattattttattttttataattttctaacacatggtgttagaaaatgaattttggcaccgtgattaagaatttcttttcaagtttaacctttacattaaaaacagtagctacaataaggatatttcaaccttacttagagaagtgataaancatcaagtcaacaagtatttttgttggagaatttttttataagcgggatagagggaagttaacatagacactcagaagaataaaatggaaattatgccaggaagataaaaaagcaaataaccctccccccaaaaaaagaataaggagcgagacaaagggcaaaacggaagaagcaaggctcaacaactttgttttcctgatataaaattcaagtacttaaaaagttttttaaaaaataattaaatgcactactcatctcaatgaaatttttcgttttccnattttccagaactttctaaaaaaggaaaccag

SEQ ID NO: 5681 - DNA, 482 bp, Homo sapiens
  misc_feature (1)..(482): n=a,t,g or c
caatgtgaaaataaacatttattataaaaattagttttgacattttaaagtgaatgcagacaaggtgttttccagttcaaaaggtccattgtaagctagagaagtaaattccaaggctggcaataactgactcatattcttcacaagtggcctagacaataaggaaccattcacctcaaattcacagagccatgaatcacctctgcttccccatgaccttttccatatccttcctactctgtcttccaaccatgacacagaactgaaacatactttaaaaatctcatccttggctaggcacggtggctcacatctggtaatcccatcactttgggagggccaaggcaggcggatcaagaaggtcaggaagtttgagaccagcccgaccaacatggtggaaccctggtctccactaaaancccaaaaattaggccaggcatggtggcacgcacccgcaatcccagctactcaggngactgngg

SEQ ID NO: 5682 - DNA, 252 bp, Homo sapiens
  misc_feature (1)..(252): n=a,t,g or c
tttttttgatgctgaaagaagactttaatgtgcacaaagaaacctcacattagtgacagggagacanaggaaggagggtggggaggactgaggcccagggaaaccagagctatggagacagaggccttagggaagaggagatggctgggaggaccngctgaggggtgggcgaggcagagaggcccatcccttgctgagaggagagggggtcggggcggtggcagaggcaggctcttgcagagaggagagggg

SEQ ID NO: 5683 - DNA, 296 bp, Homo sapiens
  misc_feature (1)..(296): n=a,t,g or c
cngcagttgggggtggggtgttctggtttaatcatattcagagtttgagcttgaaataaccaactcaagacccacaggagactatgtcaccagataaacccagtgctagaatccaatgtccagcatcttcaaccactcaggagtgtttgctgagagaccaggtggtgcttacccacccaacaagcactttccatctttgggtttgcccaagatgtttaccataaatgaaaggggtggggaaaggattatagttgacaccaacataaattaaatatccaattccagcatatgtgaca

SEQ ID NO: 5684 - DNA, 165 bp, Homo sapiens; identical to SEQ ID NO: 1025
  misc_feature (1)..(165): n=a,t,g or c

SEQ ID NO: 5685 - DNA, 319 bp, Homo sapiens
  misc_feature (1)..(319): n=a,t,g or c
ctccactccattgttttattatgtacaaacgctacagaacgnnggggacagacacgcgtggggtaagaagggcctggtgggaggagttcacagagcagacggtgcactgggaccagnagagcagaacacaggccataactatagggcaggtngggcaggaacggggttaaaaacgagatccaagccagccagatcgcaggaggtgcgggggcgtcgtccccttctnttctccccccaaggtcacagtgcatgcaataaaatatatatataggagctagatccgtcctctgcaagggctctgaagggtccaaaactccct

SEQ ID NO: 5686 - DNA, 250 bp, Homo sapiens
cttcattaaccctttattacaagtcacgctcttatagaagtatatgtggacttacgtgaaaaaatcaaatgtatccaagaataaaaaacacagcacataaagtagtatatgcattccagtgttcgcgccagagacggcgggcgcccaagtaaaagctcttctaaaacggcctgactggggcaggcgggtgcgaacggttccgggcctcaggcacagtgtgggggccgcctgcctcctccgcggcccggcg

SEQ ID NO: 5687 - DNA, 170 bp, Homo sapiens
ttttggtacaaaaggtgtctttattgaggtctgggttaaaattaggcacttggccacgagcagcagcttaaatatgaggcaagcagtcaggggttagccatgcctggggtgggttggggtcatgaggctacaggcacagactgtccccaggtggacagaagtttggagca

SEQ ID NO: 5688 - DNA, 281 bp, Homo sapiens
tttttttcctcaaaagtttttattctttttcatctttttaaactggcacactgcctggtatacaccgccagtaggcattcagaaaagtttcttttttttaaatacacaatttataatactgggaagatttcatttcagtgtttcccaaaacattattcctggaaagggtgtactctcccatgactctggataatagaagttttgttctgattttttaagtcacctcagacagacactggaacacgttagatctaacacttaagtgctttgaaagggcagta

SEQ ID NO: 5689 - DNA, 139 bp, Homo sapiens
aatgcagccaaaagtgatatttgcttttctcagaaccataatcgatacaagatgcagtgaccaattcattccttaaaacacctgggctccttaagcggctagaagacacaagttacatccagcccatcagggagccaga

SEQ ID NO: 5690 - DNA, 285 bp, Homo sapiens
  misc_feature (1)..(285): n=a,t,g or c
tccagccccccgcgtgcatgcggcagacatttatttgcacttgtcacatagtagcctgtgaggtagcccaggatgaagatgatccagaagagggccacgcgcccagcaccttcatggcgatgcccagcttgcccgtgcacagcctctgggagatcctgcggcanntgaggcctcttctgtgctggacacagcccctaggctgaactccgtccctgctgccgtcctcccacctactatagtgggacgtggctctcctgggggctgcatgctntgggggctncagcg

SEQ ID NO: 5691 - DNA, 378 bp, Homo sapiens
  misc_feature (1)..(378): n=a,t,g or c
ttggggtcggagtggttttattgggcagcaggggctcanggccggtggggcgtcaccgatacaagtagtcagcctggatnttggcggcgatctcggcctcccacttgtccccgttnttgagcaacttctccttgttgtacagcagctcctcatgggtctccgtggagaactcaaagttggggccctcgacgatggcatccacgggacaggcctcctggggagaagccgcagtagatgcacttgggtcatgtcgatgtcatagcgggtggtccnggcggctgccatcagctctttggctcagccttcgatgggtgatggcctggggcngggcaaatggccttcgcagaattttccaggcaattcaacgtttccttcccc

SEQ ID NO: 5692 - DNA, 267 bp, Homo sapiens
  misc_feature (1)..(267): n=a,t,g or c
ttcanctccttttattgacagaaatagaaatttgtgctgcagaggcagtagtacctcagagcatgagaaggtagtcaatggggctgacatgacaagccacaatgctggccaggggtcctaccatagtgggagaaccaaaaccacaaaaatagcaggaggtagcaaacatccccaacacccagtgtaagcatttccatttgcagagagcttggccatgcatctttaaaaacggggtccccttcacagctgggcagggtatcatgtcag

SEQ ID NO: 5693 - DNA, 386 bp, Homo sapiens
  misc_feature (1)..(386): n=a,t,g or c
aaattatatattacatgtttattaagagcacaacttttatgtaaaatttacatttaatgaaaaaaatcaaaaatatttacaaaatcttggaagacagatgtgcattgttctaattacaatccaaagtagtaaataacaatcctttaaaactcacatttattagagttgtgtttacaaattcttggttaaagaggcagctacaaagtttatcactatatataagcaagaaccagcttgctagggtacatttcccattgaaaatctactgggtctcttttacaccattagggggatttttaaatggggnaaaaaaaatcaatataaactcatatgggcttcaaaattggtaacctgtaccccnatacttggggnatggagggctgtgg

SEQ ID NO: 5694 - DNA, 220 bp, Homo sapiens
  misc_feature (1)..(220): n=a,t,g or c
atacaatangntttattgaggatgtgtcaatacagttaacatggttgcttgtcttttcaaaaagaagttccattttctttgattcccaagtgcatttttcctgaatcttctgtgatacagggcacatgataggtatgtagagagctaagcttcctataccaagttagaagtgaaatgactagtgggaaaacatttaaactttaatcttaaaaaaaaaata

SEQ ID NO: 5695 - DNA, 357 bp, Homo sapiens
ttttttttttttacaaattcttttttattagtcaaaatcacaatcaccttgattaaaaaggatgggacactccaccctcagcagaaaatgatacagtttatagaaaacctccccgcccctcccacaccccaattaaaaactacaaaaaaatctcccctccttccctacgatgtcatggtagtctgactcctccagtggcactgcagctctggagtggccagctcaccacagcaccctccacttcaccttggggagaggagggatgctggtggttaaggaggttaaaaccattagttccagtaatgccagttcccaaacatgcacttccttcctttcccccaaggtctgggaccaagg

SEQ ID NO: 5696 - DNA, 332 bp, Homo sapiens
  misc_feature (1)..(332): n=a,t,g or c
ttttttttttttctggagcataatgttttattgttgagcctcctaatttacaacaatgtcttttgaaatttgcttataaaattttgtcacagggagcaacaatgttaacctaattattattcacttattttcattttttaaaataaatgactataaataactgtctcttcagttaggatcagggatatcataaaaacatcactagcgagacatattttagtattaatactgatgcaaaaantgaaatagngaccnaatatttatatatatagcactatatatatttttatatattgnatactcatatcaaaacttgccatttctcttaagta

SEQ ID NO: 5697 - DNA, 436 bp, Homo sapiens
  misc_feature (1)..(436): n=a,t,g or c
tttttttttttttttttttttttttgttaccagaggaagcagcttttattgatgggttatctccagaaaccagaaagactatatgtactcactttcagttacccccgtgcctccagantcgcatgttgctccacctgggggcggatataaattacctctagattgtccaaagcccagtctttcccttccctgtgcagccttagtaaactaagtagcagtactgtttggtgtgtgtttgtttcttccccagcaatgcctactgcagctacttagtaacaactagaggtggagggtttccggggaagcagttaggatgagttaagtgtgatgcacagggaaaatagtatcgtaggcctatcaaagggnccctctgccctgcctcagtgggcttgatttcttcattgggttgcatttgctctttgtgttgggatgacgc

SEQ ID NO: 5698 - DNA, 364 bp, Homo sapiens
tttttttttgctgttatgattagatatttattgagcaccaggagagagtcagaacattagacttatagtggaggagcagaactgaaccctggcctgtgaaataacaatttcaattaaaagctgtctggccctgaagaaagagaaatgatcctggatatagctggtcctctgagctggcagagctgagcctccctcgggtcttctggtgggcaagatgccaaagttgaatagtgtctgtagggcatgatgaccaagtcctagtgctatgggcatcttccctctggtatttaggagaggagtaccagaagcccccggcagaggatactaggaagggcccagagccaaatccagcagctgggcttac

SEQ ID NO: 5699 - DNA, 416 bp, Homo sapiens; identical to SEQ ID NO: 2204
  misc_feature (1)..(416): n=a,t,g or c

SEQ ID NO: 5700 - DNA, 320 bp, Homo sapiens
  misc_feature (1)..(320): n=a,t,g or c
agttntggggtcttgtcangttgcccaggctgatctcaaattcttgggctcaagcaatcctcctgccttggcttcccaaagtgttcagattacaagtgtgagccactgacccagaccaagaaattttaaccctaactaaatacccaaaaaaagtgtatatatgttccacaaaggacatgggtaagaatgtttatagcagcagtatttgtaatagccagaaactggaaacaagccaaacatctatctacagcagaagagactattgtttatttatacaataaactacaatatagcaataaaatgaatgagctacaacaaca

SEQ ID NO: 5701 - DNA, 284 bp, Homo sapiens
  misc_feature (1)..(284): n=a,t,g or c
tggaaaaaannacaactttattttcagtcatttctatttccttggttatgaacaaaggtagcaaagtgcagttgtatcagcagtgccaatagaaattacagagtttttcatatccctttacagtttgccacaggtatcttaaaatattgtttacactcatctctcttcagtttaccattgtttaataggcctaccctcgatctttttattcaatatgttaataaagaaacctatacacatagtatcacgttatacattttaaaantnttttgacaactgtatat

SEQ ID NO: 5702 - DNA, 316 bp, Homo sapiens
  misc_feature (1)..(316): n=a,t,g or c
agacagcttttgagtttatttggcttctggcttcactggancccgaggctaagactccaaccctggctggggcagcaggaaggcatccagagagccctggccccagatgacccccagggcaggaggtccatgctctaagccctagggcaggggccgcagtagcagganttggtcaaaagtgctggtgacagctgaggccggccccttttccctgcacctcccctcctccctgnatcaccccagcaggcaattccctgagacaggntctgggtcctcccaaccagttggggtacagttttggggccccantagggca

SEQ ID NO: 5703 - DNA, 316 bp, Homo sapiens
ctggtttaaaatatttattgattaaaaaaaattaaaaattttttatacaaaggtgatgagaaaaaatctcatgcaaactccgggcatacaataaaaataactcaaatattaatatgatgattttgtacaaaataattcttttgaagtaggaccggtggcaaccaacacggctccctgctccaggccgggacgcccctctgggaggaacgcgcggccacccttggaaacctgtaagtgatccacggtccaggtgtggaatgctcacagttgtcactatgatgaatgatgaaaaccctattgctgctactcagaaacg

SEQ ID NO: 5704 - DNA, 349 bp, Homo sapiens; identical to SEQ ID NO: 5206

SEQ ID NO: 5705 - DNA, 413 bp, Homo sapiens
ttttttttttcactgaatgcataaagtcctttattgaaaatattgggatagcactgcattacatatagtcaatatccataaatgaagggtcacacatttctgaatggacaatactgttttacatagagaacacagcatctggatatgctctcacaattatagtatcatggactaaactaggtcagagtgaagtatatgcaaaatgaccatttggtttttttccattttattaatagcatatggttgcagatggtgtaaatggtaaacgtgatatcatgagacattcctgatatctcacaccaacacattatttaacgagcaggttaaggtgaaactgccagtatgctgttagtcaagagtcctcagtaggagaacttgagtgaaacgtacacccaggctacagatttaaaatt

SEQ ID NO: 5706 - DNA, 335 bp, Homo sapiens
ttttttttttttcagcattacaaaaactttttttttgctttttaggaagtagcgaggaaggaaagcaaagcagcaggatcccctagagagtttagtctttggtttctaagtttaaaggggggattggcttcagagcttggagcaagacagaagattcgacggacggatgagctggcaagggagaagggagtctctggggcatgagcaagggagccgatttcttgtctgggttcatgaagctagagagggctgcggcagaggctttgaggcctgggtatagcactggcacttaggtgggataccagcacttctccagcatgggcaggtaggcattc

SEQ ID NO: 5707 - DNA, 275 bp, Homo sapiens
aaagctacaaacctcaaggttgttttatttaaaccaaataatctgagcaagacatatatacattaaaaacaaatgaacacattaaaatttcactattttacaatctaaattctagcaacatatacaaatactgagtgactacagtacatgccgaggtaagataagtacattctgggagaatatcactgacgctcaaaccatttttatttccaatatgtatttcaatacatgtttgtttccacttttcccagtgccacacacacacacacacaaaa

SEQ ID NO: 5708 - DNA, 398 bp, Homo sapiens; identical to SEQ ID NO: 797

SEQ ID NO: 5709 - DNA, 459 bp, Homo sapiens; identical to SEQ ID NO: 1050

SEQ ID NO: 5710 - DNA, 381 bp, Homo sapiens; identical to SEQ ID NO: 5328

SEQ ID NO: 5711 - DNA, 598 bp, Homo sapiens
  misc_feature (1)..(598): n=a,t,g or c
cacagcaaacggangnanggcctgtatttcacacctgctcactcactccatggcttagaaaagaacacgtccaccgcggaggccgcaatgcccacctagagcaggtcgtagaagtagtccaggccctggccagctcccagatagagaccccaacgcccagctcccgggccagctccagccgcacctgcagggacttcagggttgggtagaagacgacgtgcctcccactgcggctcttcttgtactcgaagaagtgctctgagacctggctgtcccacaccatccggggcctgtggtccttcagtgtctggatgtacctggccccgacaacaggctcacgggcatccttggaggtcgcgtagtccataccataagaagtttgagccccaggaggattttgcttcgccactttggacttcgggtccaggacctggacgcaggctcgaacccaggacaggggtgcattagggccaggctgatgcgctgtagagtaatcgtaggtcatgaagctgaaaccatccagnaggggggcagttntcaaatcctttgtggtgaaaatgccanttggtcggtcccggggtgattgnagcggaatnac

SEQ ID NO: 5712 - DNA, 359 bp, Homo sapiens; identical to SEQ ID NO: 4437

SEQ ID NO: 5713 - DNA, 241 bp, Homo sapiens
ttttttagattcatctttttaatgacatcctaaaattcagaggaggggccagcgggacctctgggctcagcggctgtgaaggagggacccgcaacacccgctaaggcaggtaattgcaagaaggcactcgcgagggggacttcaagcccctcttctatttcttcatataaaatcagggggatggggaaagctccaagggcgagggaagcagagagtttctctcccagcctatggaataagg

SEQ ID NO: 5714 - DNA, 333 bp, Homo sapiens
ttaataaagcagaaatgtatttattaggcacccttgttcctcacagaggagcaagatccaggcctgagcgcctgggaagtctcttgaggttgcaggaatctccagagaaacataggcgctgcccagccaccaccccgagaacactatttgggctggagtgtgaccgccgaggtgatcctggcaggaggctggggttggctcctcgactccacaaacactgaggagtgggtggggacaccattgacacccacccaaacactggcagagagggaaggcccttccagattctggggcacatgttgctgggcctgccagggggaaggaggagcctgg

SEQ ID NO: 5715 - DNA, 335 bp, Homo sapiens
caagtttcaatcatttaattaacatctttaaatgaaacacagttttcttcatgtgtctcactcaggcttcagggcagagggaatggatttttagacatatcaaagactcaaaaatttaaagaaatatatatatgtatatatatacttctaacattttatggaaattaaaaatcagaggcttttggtctctccatttactctaggtcaagctcatttaccccagaggacaaagaagggctgcctcttctagaccctcccttctcctttgtcctctgtcccacccagcagggaaacaagctcagaagatcctaacaggatagagttccagtaatgtt

SEQ ID NO: 5716 - DNA, 329 bp, Homo sapiens; identical to SEQ ID NO: 2247
  misc_feature (1)..(329): n=a,t,g or c

SEQ ID NO: 5717 - DNA, 439 bp, Homo sapiens; identical to SEQ ID NO: 342
  misc_feature (1)..(439): n=a,t,g or c

SEQ ID NO: 5718 - DNA, 374 bp, Homo sapiens; identical to SEQ ID NO: 849

SEQ ID NO: 5719 - DNA, 356 bp, Homo sapiens
taaatatgacagtcttggatttatttgtaagtgtttaaaatgtccaatattcagaagttgtcaggtgttcttaccacctccccactccctcaaccagtccctgcttccagggtccaggagaagcagtgttcaggcagagtagtctcttgccagagcagaacaaggagtcctggtggccaagtggcaagtatgcaggctgggctggtccctggtgggacttctcctgggcttttcctcccatcatcttccttcacgtgtctctcagccctggcagagtttggagctgataccctgggtcatggccacagtccagttcactgggtggatgtgtccctggcttctgtccatgccaggct

SEQ ID NO: 5720 - DNA, 445 bp, Homo sapiens; identical to SEQ ID NO: 861

SEQ ID NO: 5721 - DNA, 456 bp, Homo sapiens; identical to SEQ ID NO: 5334

SEQ ID NO: 5722 - DNA, 206 bp, Homo sapiens; identical to SEQ ID NO: 4938

SEQ ID NO: 5723 - DNA, 668 bp, Homo sapiens; identical to SEQ ID NO: 5025
  misc_feature (1)..(668): n=a,t,g or c

SEQ ID NO: 5724 - DNA, 242 bp, Homo sapiens
  misc_feature (1)..(242): n=a,t,g or c
cttacacaggntatttacaatcataaaagcgancagtcctggtaccagagtgtgagggcaagaggtctgtccatcctccctctggcagtcgggccctcgtgtccttttgcctcagggacggaagcttttgcaggagctgagttgttcaaaggagcctgcgataagagagttgtctagtgaggaaacctcgagatgtcaggattggcacgaactccacggcgctggctttgggggatcgctgc

SEQ ID NO: 5725 - DNA, 371 bp, Homo sapiens
  misc_feature (1)..(371): n=a,t,g or c
tcagccaatcacaaaaaacagactttattgaagtatttagcactaaaccccacacaattccagctctgtagctgaggacacagccacttggcaatggcaccaggtgttatacaagaccaataagttaatgtaaaggacgcttaggtgtggagggccagtgctcagccgtctcctggctcagaacaaggcactctgggctccagttaggacactgagaggccagggaaaccaacatgccctggagaaaggggcttagagacaaaccggaaaagcacagcatccaagcagggtattcacgcatggggggcagagtaggcccaaaagttgggggttgcctgatgcggtaagagcacagttgagagnaattncca

SEQ ID NO: 5726 - DNA, 638 bp, Homo sapiens
  misc_feature (1)..(638): n=a,t,g or c
tggggtgcgcggcctggctactctggctgcaggccgagggttgaacgtttattcatcacaattaacagcctatacaagcatctctagaacagaggctgtgggtccaaacgggtccctgcagctccaaccctctggcctctccgggcactgcctcacagccgatggagcatggctgggcaggcagacaggacacaggctcagtcacagggtgtcagggggaagctcttctagctggaatgattggaagttggcccagcggctggggctggtctgtcccttcccctcctgggaagttccacctccactgtagttaaggccaccaggatgaaagcagggttaggtccagggacccagtagagccttgggatgcatgaggtgggggtaaatgggcttggcagagaaatggagattgggaaggggcctgattagaatagaaactgatgatgttggttcagcacctgcaagatgaggaaggtgactgcagcaaccttagagcttcccaaaggaagcaagtgatgcccccatctgccaagagggtactccttcagcccttgcacaagagccagaccaagtgtccaggaactccacagacagaagcctgccgagttangggatgtggttaagaaaatctcccgggc

SEQ ID NO: 5727 - DNA, 292 bp, Homo sapiens; identical to SEQ ID NO: 353
  misc_feature (1)..(292): n=a,t,g or c

SEQ ID NO: 5728 - DNA, 346 bp, Homo sapiens
  misc_feature (1)..(346): n=a,t,g or c
ttttttttttcttttaggcactttttattttccaaaaaaaaattgtcgttaatatataaacatctcattctctcaaaaaattctacaactatacagctgtttgctccattatttgcataggaaatgaccacaatacaaaaataagagggaaaaagaagcaaaacagcaaccgatttctgcttttcatgtaggtgtgtttccacgtataaacattttgaagcctcttacaaaattatttacatcgtttgtcatcnatttacatcttttaagagcaacttttctaacaaacaaaactataatttatcaagttatgnaaattgtcttctaaaaaaacttactatattac

SEQ ID NO: 5729 - DNA, 469 bp, Homo sapiens
tttttttttttttaaaaacagaagcgcgaccatttctttattaaattatacaaaagggttggggaggggggcagctgtggggctcggcacaccccgggccccaccccggcctggcgctgtctgagaagaggggatctgagggagatccagggatcaggcaggatagggatggggcaggacatgaggctgggggatgcagaggttaggtgggagaggctaccggagtaagaatgaggctggtaggggagggagaaagagagcaaagagagagaggagcaattgggggccagctggagagctcagatggagcaggtcaggaggtggaacaatggcagagtgagggtggagggcgcagtgtctggagaggcggaaatgagaaggctggggagaaagaagagggtggcagctctggtgcagggcccagagcagggagccaggtgaagagtggctggactttgctgcccccacc

SEQ ID NO: 5730 - DNA, 4003 bp, Homo sapiens; identical to SEQ ID NO: 1013

SEQ ID NO: 5731 - DNA, 4003 bp, Homo sapiens; identical to SEQ ID NO: 1013

SEQ ID NO: 5732 - DNA, 419 bp, Homo sapiens; identical to SEQ ID NO: 360

SEQ ID NO: 5733 - DNA, 385 bp, Homo sapiens; identical to SEQ ID NO: 4916

SEQ ID NO: 5734 - DNA, 399 bp, Homo sapiens
gaatacagagcgtctgtttgggatgacgaaaaagttctagaaatggatagtgtcgatggttgcacaacatagcaaatatactaaaagccactgaatagaacatttcaaaagcatgaattttatctcaatatttagaaggaaaaataaatattcttagaagaaacaatattaccatcataaatggaaaaccggtaataataaaatacatacataaatattaagatttacaatgtctattagcaagtcaccctaactcatcttacagaccaccagtaggacaattacccctttgggtgacatgaaaaaggctgccagggggcttatgtccagtgcccagggtccagcatggcaacatattttgtaaaaagttccagcaggctgtggacagcaggaataggc

SEQ ID NO: 5735 - DNA, 429 bp, Homo sapiens
  misc_feature (1)..(429): n=a,t,g or c
ttttttttttttttaagaggagaaagtaagtttatttttctttgcattacatcactgagttcccataggtatgcagaggccacctaacaaaactccatctccctgcccaaagaatgcccagtgggagcgtataactgtgtaagtaaatggtttcattgtaaataaaagaaccttagaggcggacttgtgctgtggagagtacaatggcctggagcagngagacagatgctagacccaggcctgctgtgtgacctggatatatcactggcttctctgggccacacactccccagatataccaacaacagggcaggatcagagggaaggatctgtctgaggtcccaggagctcacccttcagctgcaggcggatctccctccccagctgtttgatctcatcgcgcaggttctgcagctcctgcttcatgcc

SEQ ID NO: 5736 - DNA, 193 bp, Homo sapiens; identical to SEQ ID NO: 1350

SEQ ID NO: 5737 - DNA, 278 bp, Homo sapiens
cactggaagcctgaggggctgttgctgagcctcagccccagaaatacaaaaagtctttatttcacagaaattagggccatttccatagttatggggaaggacgtgtgagcaggatgggaggtgctcagctgactgtcctctccagaaggctcttctgagctgagcaggagaccccagggccacagccgagccccaacctagacacggtctgagctccaaccttggctggctatacttcaagggcgggtagggccggcatggggctggagggagtcagc

SEQ ID NO: 5738 - DNA, 330 bp, Homo sapiens; identical to SEQ ID NO: 3155

SEQ ID NO: 5739 - DNA, 433 bp, Homo sapiens
cttttgttgtggctgctgttctattgatggcaggtaatcatcactcttcactagctgagcattcggtccactaacctgagtcatatccggcactggtttctctagaaagggctccgacggggaatgctgatgcacaggcactttctgcggggtgttctggggtgatgggtggagctgtcccaaggctggtgatgagggtgtggaggtgaagactggtggtgcaagcccgggtgaggctgcagtggaggacaggttggcaactgctgaaaagatggctgttgaccaggatgttgttggccaggtatcagtcgttcctggattgcttgtgggtctccaaggccaacaccaggacaaccatttggcctcatgtgcccagtcaattcccttggtgccgaggacatgcctataaatggacgagactgctgcatgtttc

SEQ ID NO: 5740 - DNA, 358 bp, Homo sapiens
ttttgttttttttttttttttcacataccaacaaaggactttattagtgcaaattcatttgaatatttacaagcatatatgatagtgcatttcgatgcaatctaagaaggaatacattacatgggaaactgtcttaatattttcattataccgtgcagatttctagaaaaatcaacaagcaatagtcctgtctgaagcacagaatttaaaataaagtttacctccattacagacaagaaaacaaaaaattatcggccttataaattttagtatgagtacttaaattaggtacttcacagatttattttcattaattaatgaacgaaagtaactggtatttataagaaatataacattg

SEQ ID NO: 5741 - DNA, 249 bp, Homo sapiens
catggaaaatactgtatttgtatacacaggaaggatagctgcaagcccctcacagaggaaactccaccccaaagaaaaatcttagcagcaaattcctatctccctcagcactatcagcacagcccaggccagaaggttgggcttcttgtctctgggaacccatcatacccttcccgccaaagaattctaaataaggcaggaaaaaaaaatattgtgagtccagtggggagctggggtgcctggtcattc

SEQ ID NO: 5742 - DNA, 322 bp, Homo sapiens
aatgtcctagcttggtttggtcttgaaaagattcataatcactccaaatgaaatgctcctcccttggccaccaatgtgaagggagggtagaaacctgaggctagacttctgacacaagaagaatctgtcgagagcacagtctcccagtcaataagaaggaaggagagagggggatgagctcgcacccttgagaagaaccttcatgagccaattcccaaagcatcaactccgcatggatactttgcacacacatcagccgtgtctaatggacacacacacgtgcatacacacgtgagcacacgccgggaccacagacccttat

SEQ ID NO: 5743 - DNA, 297 bp, Homo sapiens
ccttcttaaaaatattacatgttttattatcctgtccccagagggtggtttatccagaaaccaagaaaaaaaatcaatcagaataaactcaaaaaaaaaaggtagggggagcaaaaccatcaaccaccaggcagccaggccatcagcccacctccacctctggagggtccccagagacccacgcccgacgcagacccggaggagcatcagcaaggggcccgggcagagaatcggctatgtcttcattatgagagcaggagagacggcagagatatgttgctaggtgaatatatattt

SEQ ID NO: 5744 - DNA, 478 bp, Homo sapiens
ttttcaatttttaatttttttatttagaaataataaaataagacataatatataaaaatatgtacaatccatggtttgtgcagtacaataggaagactttagatacaaaaagacagcaaatgggaaaataataactatcacgattgtcaatggctaggattgttcaacttgccagagcccagagcggaaacccaaaattaccagaaaagagattctactttgctgagggttggggatgggcaggtagctatgccacacttttttttttcccaccttaacattattagacacagagtgaaaaagaactcactctacttctcaggacaagcttttgcttttactgagtggtttattataaaatatgaagtgacatttattaattgtaagggaaatatgatttacgggacagaactcatcaaataaacagagttgagataggagtgtactggtaagaaaggaagtaaagagaagaaagatg

SEQ ID NO: 5745 - DNA, 302 bp, Homo sapiens
tttttttttttagtgcttgatatttattgaaaataatgccaatgctttttccaggtagtattgaggagctgggctgagtgcttgtttgttttgtttttaagtactatttgtccaaatgcacacatctgtgggactgctgcaattttgaaagaaaaatgacagctgtgtaaaaccagtgcataggaaaaaagaagtgtcaacaatttggctgccaggcacaccgcgcccctgcagcaatctggtggggcaggggaggacactcggagtaggtagaaaactaaccaggctgaacggccccttca

SEQ ID NO: 5746 - DNA, 172 bp, Homo sapiens
gaattatcaaactttattggcttgttaaaaatgattgaattcagcaagtacatttatgatctatctacattgttaaaacagcactaaaaataaaattttttaaaatgattatccattatttacagaaaatgtggaaaagatggcttttaaacccagaacattataggaaaaa

SEQ ID NO: 5747 - DNA, 267 bp, Homo sapiens
ttttttttttttttttgttacacagctctttaataatagtggccatagctgtaataacaatgacaacagtaggtaacggtagtcataccaacagtagggcagtgcattttatattacaactggtttcttgctctagtaggcttggggatgggtgaagacggacagggctggcgcagaccctttccttctcctctccagcccacagtgatctgggcttttacaagacagcctgcttccattcagtagtgtgggaaagttccttcttgg

SEQ ID NO: 5748 - DNA, 418 bp, Homo sapiens; identical to SEQ ID NO: 5343

SEQ ID NO: 5749 - DNA, 586 bp, Homo sapiens
ttttttttttttttttttttttttttttttttttttttttttttttgaagagcacaattgcatttattttatccaatatgcagataagtctaagaaactaggaacagtctgtatacttgggtgtattttcttcttaactcttctttggctaagtcagcaagcccatggttactagcgtcccaagcaaacctgtcaacgtgaaacacgtgtgcccagatagaagacgggtagtacctgaagtggttccacttcctttatttggggttgtttcatgaaaatgcttggttgtcctggaaacaggtgtactccgtgttgcttgagcatttggtgtggtggtttttgtggtggttttctgaaaagttggtgagacttctgtagttggaacatttactgtggtaggtttctgaactgttggtgggaccttgggagttaaagattttcctctgcattcaggtggtggggcaatccaatctccgtcatcattattcacagtacaataaatagaggtgcctccaatcagtgggaatcctttattacatgcgaacgttaaagactgtcaatatccaaaaaggtccagtccccttga

SEQ ID NO: 5750 - DNA, 362 bp, Homo sapiens; identical to SEQ ID NO: 923

SEQ ID NO: 5751 - DNA, 257 bp, Homo sapiens; identical to SEQ ID NO: 5344

SEQ ID NO: 5752 - DNA, 454 bp, Homo sapiens
tcacggctgataggcttttattacagactgggggcggtaacggctggacagagaacggaaaaggaacatctgagaccaggctcaaagctagggggttacacaacctccaataacacaaggtgagtgcagcacttctagacacacacacagacacacatcacttactcataaacggcacagcctacggtacaagaaaaagggcaaggtaggtaagggcacccaacaccctcctgcctgcagggggccacagggttaatgtgccttcctgcacgcaggcttaagagggataaacaaggagagggctgcccttggagaaggcctgcggataatagtgactgaggcacaggtccatgcaggggaaggaagcacagttcacagagtggcaagctcagtgccagccagtgcaagcaacaggcagttctttgatcctggcttagtcacagcaaacatttac

SEQ ID NO: 5753 - DNA, 305 bp, Homo sapiens
tctccacaaaccacttttattacccagtgggtgggctgggctgtgatgttggagaaccttgggggtgggggctgcggaatgcagctgagcctctcctggctctgtctgctggtctaggccagggtggggctgatcaagggcagagagctcaatcttgggggaagaggaagagaggacagagaggccaaacaggctcttcccctcctcttcacccatgccacagcattaaataaacaaaaagcaactctttacagcacaaactacacagggaagtccttcctcccagccctgggcgcacagcatgg

SEQ ID NO: 5754 - DNA, 392 bp, Homo sapiens
ttttgaacgtacacaagctttattgggcaacagcaacgagccacgctggcaaacaatgaaagtagagtcgctcagaaacacgaaagatcatatgtgtgtcatcacagcatcgagaatttaaatcatctggaagttcctgctaaattaaagcatactgtgccagagctcccctctaatcaaaaaacgctgtcctggtgaaaatttgcaatgaggattacagagagagagatcaaccaatgaggaaatcacagactcttacatgagtttacagttaaccccactgcaacaaaataataaattagccataatttgttttttttgcaaataccatgccccccacctgaccccacaaagacaacagtcactgacatggcccagctatattaacagac

SEQ ID NO: 5755 - DNA, 194 bp, Homo sapiens; identical to SEQ ID NO: 2609

SEQ ID NO: 5756 - DNA, 294 bp, Homo sapiens
tcctttttgggtctggaacactttaaaatagttcttaaacaatccatagcctttctatggctccatggtataacataaaagctttaaaaatcttttttgtaccaaatggctgattctcaagaacctttgccatactgagctcctgcctggctcacagcttgaatttcatctctctttcagggtcatgatttctgctattagctggcctctttgtaaatcaacacctttgggaaagatcggaatctaagtaatgacagaaactgtcatttagccgcgaacaagaaaatgggaatt

SEQ ID NO: 5757 - DNA, 407 bp, Homo sapiens
ttttttggttgttcatttgccatttattgttctgcaaagacacctcatgagcaccaggtggcgatgtcctttcacggagcaacaccaaagacttcaaaaacattccagttacaaacagaacaattcacttaggacattcacctgcctatcccagaacccccaatctaatgccggggaccacagagaaggaaaggggtcaggggtcctttcttgtaccagtgagccttcccccagttttctcatgcacacaacagtgcaataccaagacgagtacttttgaccaagtataaaaccacagagaagaccaaaatgtacaaaaatgggaagagaatgaaaacacaaaggcacacgcagccacaaatacacaattaaccttttaggggatgagcatctgacgaggtttgtct

SEQ ID NO: 5758 - DNA, 174 bp, Homo sapiens; identical to SEQ ID NO: 5353

SEQ ID NO: 5759 - DNA, 418 bp, Homo sapiens
ttaagacggagtctcgctctgttgcccaggctggagtgcagtggtgtactcttggctcactgcaacctccacctcccgggttcaagtgactctcccgcctcagcctcccgagtagctgggattagaggcgtgcaccaccatgcccggctaattttgtatttctaccagaggcggagtttctccatgtaggtcaggctggtctcgaaatcctgacctcaggttatctgcccgtctccgcctcccaaagtgctggggttacaggcgtgacacgccatgcccagcctaaaaggacattcttaaggcagaaagaagggggcaggcaagggtggtctcagcccccagatggaagtcagagtgggctgcaaaagatgcagatgggcaggcagggagacaggtaaacagacagagagacaaggtg

SEQ ID NO: 5760 - DNA, 326 bp, Homo sapiens
ttttcgtggtttcgtctatttattaaaaaatatttgagaacaaaacctctgcctctttgagtcttgctctggcatccccagcatctctgattctccctggtgcccccagctcaggaagaaggtggtagtggggagagagggtcaggggggcttggcagggatgcaggcaccatgacttttgtgaccagttcctagagacgcatgggtgtagcctcaggaggaaagcgagaggagctttaccatgggaacgaaggaaagggacaacattgggaggcaaacgttgggagactagtccagaaacttgcagttgaggatacaacagggtc

SEQ ID NO: 5761 - DNA, 388 bp, Homo sapiens
gttagctagtatcttttattgtcagaacttctgtgagccaacaaacagttttgcatggttgtacacaaagggacaaggcaaatttcttttttcgtgtgggtagacttagttggcccaagtccttaaaacttttccatataaaaataaaaagtccaagaccagattatttttcttctggtcataaatgctgatttatttacaggtgccttgttcagaccaccattataaacttgggataaaatatgtgtgtattaaagcctcagcatttaatgtcagggtcctttgaagattcactcaagtgttaagacgtttctggaatgcagcgtctctcccccatagtcaacatggttattatatctgtaatctatccagaatgatagaagctaac

SEQ ID NO: 5762 - DNA, 411 bp, Homo sapiens
ttttttttttttttttttcacagtacaactcaacactttattccattgtgattggtatacatgtaagattgagacatcaagagactaaaaatcagtgcagaacttctctgaactaaagggccgtgaaaggcatgattggttttggcacacagagtggataaccatacattggctggaatgaggtggtcaggaaaataaaatgcacaaatctaacaccatgttgaaatcatgtctgagttctggagaaagttaaagtgtaaataattacaaagactgacatgcaactcttaccttacattattcatctacagactatttttctcccttagagatgaggagatggccttagtaatctgttcagagtagctgaaaagaccaatcaatacacattagaaagatctgcctgatttc

SEQ ID NO: 5763 - DNA, 206 bp, Homo sapiens
  misc_feature (1)..(206): n=a,t,g or c
aatggcattaaagttttattagtatttgyccamatytatacagttatttacagggcatgaaantggaaacagcacacahatacacttgaggtataagyyagagcacagtatgtcatgtttcaataaatataattcaaaatttgtaaactaggtgaccagatacatgagtcttatttttrgtaaaaccatataaaatatttatytca

SEQ ID NO: 5764 - DNA, 280 bp, Homo sapiens
gtataaaaataattttatttactactgtaaataaagtagtgcaaagagtagtttggacccacaatattgcattactgatttattcactaccttagcagcatgtagtatacagacattctgctcttcctcttcctctctaacacacacacacacacacacacacacacacacacatatccctgtacagactcacgcaggcatgaggggtagggatgaaactataagctagaggcttacttgctgcatattccgttgctgccagtctattctaacgtgtaat

SEQ ID NO: 5765 - DNA, 266 bp, Homo sapiens
  misc_feature (1)..(266): n=a,t,g or c
aatcaaaaccatctttattatttaaagagcatcccgtcatcaggggcacctagacaggagtcccagacagcagaacaatatttacatgggggtcaggaggtgaggttgggtggtctcggggctgagtgggcccgccactntggaagagaggaccctggagggagggtgtccttggacctgtggaccgggcccaagaagaaaaacgtcccatcctaggcccagcgtggatcccaccaccgggntcacctcgggccctggaggctgcg

SEQ ID NO: 5766 - DNA, 263 bp, Homo sapiens
  misc_feature (1)..(263): n=a,t,g or c
gacaatgtcataggcatcgttcatcgacagattgagcttctgcataaggtaagccacagtcacagtgactgancggctaatgccagccaagcaatgtaccaagacaccacagttcttgccccgggcttcatctatgaaagaaatggcctcagggaaaaactgggacaggttttggctccagtgatccgagatggggatttgcttgtatttaaactctcctgcgttctcaaagagattcggcaaattgggggtgacgttcaaga

SEQ ID NO: 5767 - DNA, 292 bp, Homo sapiens
tttttaatgaaaatcgcttttattttatcgcttttgttttgtatttttgcaacagaaaccccctgctccagagtcagactgtagctgaactgttcagactggagaatggagcaggctgtgggccgccaccccgtggtcccctctcctgggcaagcgcccacccccagggaacaaggtccaggcaggccagctcactgcacgcactggcaccaccacttagccatacaggtcatcatcattgtcttctgtgtatacactgccactgtgccggacctccactgccctgactggg

SEQ ID NO: 5768 - DNA, 353 bp, Homo sapiens; identical to SEQ ID NO: 1584
  misc_feature (1)..(353): n=a,t,g or c

SEQ ID NO: 5769 - DNA, 378 bp, Homo sapiens
  misc_feature (1)..(378): n=a,t,g or c
acaatctgcttcctctaatatatccccagtctaaggcatttaaaattaaacagctcttcaacgccccaagttatttcatcaggctaagaacttctccgagaaacgcacaagaaggcaggcaaacaggtgggtaggtgagaggtcacggggctccatctgcaagctccatctacaaggcatcaatctgcgttgtggcatcaacgttaaaatgttctacagcttagggatcttcttgaagcaaggttccaagcacaaaactagtatgaccggaggcttcaatttagaagatgcagcatctgaaaacctttaccccaggaaaggaggggtgcctggctgggattncatggggctctggaacaagcattttattcaaagctg

SEQ ID NO: 5770 - DNA, 375 bp, Homo sapiens
  misc_feature (1)..(375): n=a,t,g or c
agcantgccctctccccacagtaataaaaagcactgtacataatgccctgggaagaagttagacatgaactccaatacttcaggacaagtatggttctcaaagtgtgatccagggaccaaccctctgaggaagtccacgaggtcaagctattttcataatactgctacacagatgttatttgtccctttcactctcattctctcacaagtatactgtagagttttccagaggcttcatgaagtgtgtgtggtgacattattgctcccanggctaatgtaatgtgtgcatgtgtatttattttaaaaatggattcgctttaatttcnagtatgggtaagtatccaaagnaccaaatataagcaaagcnccttgaga

SEQ ID NO: 5771 - DNA, 372 bp, Homo sapiens
  misc_feature (1)..(372): n=a,t,g or c
agaacaaaatatattttattttaattataccagcacagtaaggcccagaaagaccatggagttgcacaaagaatgttcagcaccagcaagataaaacagatactggcagtcagtgctaacggctagcacacaagcccctgccgcatttgtatgatctggagcaganctcctgaacatcttcatccatgtgaccctgtgcagcactaagaaggtgtgtccgataaattgcaattacttcttggtgctgtctgtcagcatcggccagctgttgctccagagatttcacttggtgctgcagagtgtcaatcagctggctctgcctcttggtggggttcccacttgtgtaggtgagttgggaaaggccattgagtg

SEQ ID NO: 5772 - DNA, 544 bp, Homo sapiens; identical to SEQ ID NO: 1366
  misc_feature (1)..(544): n=a,t,g or c

SEQ ID NO: 5773 - DNA, 138 bp, Homo sapiens
ttttttcatcaccatagtttttaatgaagaaacttgtttaaaattgtaaaggaaaaaatgggaatgggacggcaaaatcttagcagcaaagtggttaaacaaattgaaaatattaatgcacaaacattaaaatattaa

SEQ ID NO: 5774 - DNA, 463 bp, Homo sapiens; identical to SEQ ID NO: 1895
  misc_feature (1)..(463): n=a,t,g or c

SEQ ID NO: 5775 - DNA, 306 bp, Homo sapiens; identical to SEQ ID NO: 5363

SEQ ID NO: 5776 - DNA, 447 bp, Homo sapiens; identical to SEQ ID NO: 3457
  misc_feature (1)..(447): n=a,t,g or c

SEQ ID NO: 5777 - DNA, 164 bp, Homo sapiens; identical to SEQ ID NO: 5364

SEQ ID NO: 5778 - DNA, 510 bp, Homo sapiens; identical to SEQ ID NO: 3266
  misc_feature (1)..(510): n=a,t,g or c

SEQ ID NO: 5779 - DNA, 348 bp, Homo sapiens; identical to SEQ ID NO: 754
  misc_feature (1)..(348): n=a,t,g or c

SEQ ID NO: 5780 - DNA, 415 bp, Homo sapiens
  misc_feature (1)..(415): n=a,t,g or c
aatatcttagttttttttatttcccttgcaggcaatctctttgaacagaggtttattcaatgaaggaaaggtggagggaagaagggaagaattacaatggttagaaaagagcaactaaagattatttctattatacttctgaacggtaaactagcaattttaataaatattggggtccacttaaatctattaaagcagaaagtgtaaagctatctccattagtgaagagatgaagtgacaaaaaccaatcagtttttgtaggcaactgatttaggaaaatcttgtactgaaatcaacaattagacttgcacatcataggattttcaaatgtttgctgaattggaaaaggantttttccccggggattttttncccccgagggggtccttnttccaatgggggacctccggtntgg

SEQ ID NO: 5781 - DNA, 396 bp, Homo sapiens
  misc_feature (1)..(396): n=a,t,g or c
ttttttttttnctgccaaaagcctttaatatgccctggncccaggctgtnttcatgaaaagcggacacagcagtgcttccaacttcaatggttcccaggttcaaggttcctcccagcggaggtgggagggcaagccctcacacctggcacccctgaagtgcatactcctggaggaagtcgttgagctgggacaggctgcccgntggcgtngctccggacaaggctttcagagggcatntcctcgatccagctattcgagtccagcaggtactgggggtttccctcgaggtcataggtggccccatntagacccatgatcaaatattctttcccaggttccaagcgaaggggccaggaggttcgaaccaggnanttncgcatctgattagcagcggc

SEQ ID NO: 5782 - DNA, 322 bp, Homo sapiens; identical to SEQ ID NO: 2640
  misc_feature (1)..(322): n=a,t,g or c

SEQ ID NO: 5783 - DNA, 330 bp, Homo sapiens; identical to SEQ ID NO: 5368
  misc_feature (1)..(330): n=a,t,g or c

SEQ ID NO: 5784 - DNA, 207 bp, Homo sapiens
  misc_feature (1)..(207): n=a,t,g or c
ctggacagcgggcagcaccaggcggcggacagtgtcttccttctgcaggagcagcgcgnggctctccaccacctcctctccatccttggtccagcgcacctntgcccagggccggcatagctcacaggtcagcaccacacgctccaggcgcacggctgccacatacaccttgccgctgggatacacgatccacgaggagacgtctgt

SEQ ID NO: 5785 - DNA, 391 bp, Homo sapiens
  misc_feature (1)..(391): n=a,t,g or c
ttggtatanaagttttttatttcaaaatgcaaaatggtggtcattgtaataattaataataataacataaaaagcatttatccttcctccctagtgcaaaatggtagacgcatttagataattcacacagtgttggaaatgtcatgacaatgcagtgctgcacagagagatactcaatcccaaactcctttggtggatgcttgtggtaggtcagttctagatgtcagcggtttctctgaagttaagtccaaataaaaaacagcacgtgctcctgcactctcccagcggagtcaggctcctgtgcgcgcgccccctctggtctctcccttccttctcggtctgtctctgtctactgcgtntccctcccactccgctggtctcccacagttcc

SEQ ID NO: 5786 - DNA, 465 bp, Homo sapiens; identical to SEQ ID NO: 779
  misc_feature (1)..(465): n=a,t,g or c

SEQ ID NO: 5787 - DNA, 301 bp, Homo sapiens; identical to SEQ ID NO: 2648
  misc_feature (1)..(301): n=a,t,g or c

SEQ ID NO: 5788 - DNA, 211 bp, Homo sapiens; identical to SEQ ID NO: 1909
  misc_feature (1)..(211): n=a,t,g or c

SEQ ID NO: 5789 - DNA, 341 bp, Homo sapiens; identical to SEQ ID NO: 2329

SEQ ID NO: 5790 - DNA, 376 bp, Homo sapiens
  misc_feature (1)..(376): n=a,t,g or c
agctcatcagctatcgttagtgtattttatgtggcccaagaaaattcttcttcaaatgtggcccagggaagccaaaagtttggacacctgtgatttacaggttatgcctagatctgaaacagatccccatccctcctaaagctcgcccactggttatgggccctgtttctcttagaaacaccacacacatcatttgggaaaagcacactgagtagaaacatggcctgaaagggtggtgggcggtggacctggcttcctgtggccagaggtcagcggacgatagaaatggtctgatcggccacagcaaagacttgggaagattgggccccgggaaggacacattgattgggcacagagcactgtgccggacgngggc

SEQ ID NO: 5791 - DNA, 525 bp, Homo sapiens; identical to SEQ ID NO: 1913
  misc_feature (1)..(525): n=a,t,g or c

SEQ ID NO: 5792 - DNA, 470 bp, Homo sapiens; identical to SEQ ID NO: 5379

SEQ ID NO: 5793 - DNA, 553 bp, Homo sapiens; identical to SEQ ID NO: 5380
  misc_feature (1)..(553): n=a,t,g or c

SEQ ID NO: 5794 - DNA, 476 bp, Homo sapiens; identical to SEQ ID NO: 5381
  misc_feature (1)..(476): n=a,t,g or c

SEQ ID NO: 5795 - DNA, 455 bp, Homo sapiens
  misc_feature (1)..(455): n=a,t,g or c
ttatttccttagtttattaaagatgacaatgaactgccaggctgcacaagcaccacagcaggtggaaacgcagttcagagcacgggcggcacacacggaacatctctactaagactcgcactccttttatgttagttcaacgaaagctctaaatccttggcagagaacgtcaaaaacagcctcatttaagtggaaaatatttgtcttccactcttctgctatgtcttgaatcttgtctccacctggtaagcaaactatgttttttttctttccctttacttacagaaagaacactatcacctgccttcatttagaaggaattctcttcagtgcattcaaagcttctccccngcaacagcagggggattttcagatagtggtaacttgcaaagtgcttccaaaacatcccatcctctacccactttcccccctcttggaataaataactggggngg

SEQ ID NO: 5796 - DNA, 580 bp, Homo sapiens; identical to SEQ ID NO: 2660
  misc_feature (1)..(580): n=a,t,g or c

SEQ ID NO: 5797 - DNA, 473 bp, Homo sapiens; identical to SEQ ID NO: 2662
  misc_feature (1)..(473): n=a,t,g or c

SEQ ID NO: 5798 - DNA, 411 bp, Homo sapiens; identical to SEQ ID NO: 5014
  misc_feature (1)..(411): n=a,t,g or c

SEQ ID NO: 5799 - DNA, 353 bp, Homo sapiens; identical to SEQ ID NO: 2664
  misc_feature (1)..(353): n=a,t,g or c

SEQ ID NO: 5800 - DNA, 253 bp, Homo sapiens
  misc_feature (1)..(253): n=a,t,g or c
atagatttcacgtttaatatgtaatggaagctctgtaacatgagacagatagcaagcacggactctgctcactggtcgatgatggagcgctgcaacacctgattcatcatgtcctcttcatcaacatcataatccacaaaagtctcannnngaaaaccggtgccggcgctggatgtgctctctgaagttggcgctgcggnagttgggggtctcccaagggcatcgcggcacatatnggacaanccacagnttt

SEQ ID NO: 5801 - DNA, 412 bp, Homo sapiens
  misc_feature (1)..(412): n=a,t,g or c
gcctggtcttgctcagactttgaggagccctcaggcgngtgtcagctgtcgctgatgggccttgtaatcaaacttgtagtaggtgtgcaggatgcgcanaggntagatgcggcagacctcctcggtagtgcccttctcctccaggtagcgctgcacacgctcgatgatggcacacacctgggcctcatccttcaagtgctccacgtactcttgggagtgagggtcangtattntgcattattttggtaaattcttcatccattcgttccaccagagttaggatgcagccacggacacgcanggcttggtcagcgttngttgcaggttctcantctcttccagaatattctgctccaacaaaaatgtttgnggatttggcaaacagggatanccatcagctcattggatgcag

SEQ ID NO: 5802 - DNA, 446 bp, Homo sapiens; identical to SEQ ID NO: 846
  misc_feature (1)..(446): n=a,t,g or c

SEQ ID NO: 5803 - DNA, 394 bp, Homo sapiens
tacttttttttaaaagatttttttgtaaagaagggttgtatttagaggccagtagctagagatccaaccagtggacctcttgaagcactaccaggccttaaggcaccatccgagggagactgggaaaactattattcacccaagcctccggaaatgtaatgtaccagcaggcaaaaaacagttcttcatgtagtacaaaatgaaacgaaacaaaaacaaaaacagaaagtaaaaatgaaaccaaaacatttcttaaattctagtgccatagcttttttgtttgtttgttttttgttgttgttttgttttgttcataagaaagagagaaagatactacttatccgtcagacacatgcatcctcatgtggtcgttgaactgctccgatttggtcaa

SEQ ID NO: 5804 - DNA, 346 bp, Homo sapiens
  misc_feature (1)..(346): n=a,t,g or c
ttttttttttttttttttttttaaaagactaatgtaacttcttttaattgtcattttatgctttctgcagctgcccgccaccctcccttcccttggatgaccacttttgtaggctataggggaccagggaacaaaggctgtttgnnnnnngggngggacanannanccccaatcanntgnnnnanannaagctanaattacaaatnnannacaanaantaatgctgannnctgggagagctgcanagnggggaggcccgctcctctttgtcagggtctatttggcagtgaccttgctctgaaggcgatggtactccttcagctgacctnggccaccccggatngaa

SEQ ID NO: 5805 - DNA, 234 bp, Homo sapiens
  misc_feature (1)..(234): n=a,t,g or c
gtgatttatttgcaatgggcacagtgatgcaaaaacaagatattaagactataaaatatgtgactacaaagaaccagcgaaataaatacatagatattagatagtccaataacttaaggnncccgtgcaacgatncgagggatccgcgcncacnggaagttcttcttgctgcagggcttggagagcgccggccacgtcctagcctcggtccgactcgtccagcgtatggcccgc

SEQ ID NO: 5806 - DNA, 451 bp, Homo sapiens
  misc_feature (1)..(451): n=a,t,g or c
tttgcaatcctcaaaccgtttattgacagcacaaggctcaacagcaggtgagcacgtgagggtgngaagcgcttgnaggcagtgtgggcaccaggcaggggatcccggagaaagccctctgccagggacatggtgagggcgtggcatcaccacgaagggagcataaataacactggcaggtgggtgggcagcaggagagggagagcggacannacacggggacacgcagggtcggcgggaaaatgctgggacagggtcacacggggattcggacacgcagacacagaagggatcatgggacgcccagaggatgccagagggggcagacacaccagagactcggggatgggcatggtgctctgcccgtggtggcccctcctccaatactcgccctgggctttgcaggcaggactgggcggctgagcactctcccagcagagccaagcagggg

SEQ ID NO: 5807 - DNA, 437 bp, Homo sapiens
cagttaatttagaaagtttattttgccaaggttgaggacacactgtgacacagactcaggaagtcctgatgacatgtggccaagatggttggggcataccttggttttatacattttagggagacataagacattaatcaatatatgtaagaagaacattggttcagtggggagggagcttccaggtcacagataggtgagacacaaacagttgcattcttttgagtttctgattagcctttccaaaggaggcaatcagatatgtatctatctcagtgagcagagagataactttgaatagagtgggaggtgggtttgccctaagaagtttccctaagcttgagttttccttagtgattctggggccccaagatattttcctgtcacagttgacatccccaacacagtgtttagggctcagaaaaagataccctaaa

SEQ ID NO: 5808 - DNA, 565 bp, Homo sapiens
  misc_feature (1)..(565): n=a,t,g or c
ttttttttttttttttaataaaaatctttatttttttattaaaaaagaagtactttggtagctatttaaataagnngggggtgggaatgaatgtcgagatacgagcacctgcatcttttagtcaattgtcagtggagtcggtggggtgctaagtgttctgaactgaagtaggtgcactaaggttccaagctccctgcaaggatctggacgggaggaaagcagaggccctgaagggaaaaaagcctgcttcccaatacttattttttattactgtacaaaaagcacactctccctctttttgtctctcccaccaacggcacccccccacccccaacccaagaggactatacatggagtgcagggacagagttgaccaggaggcctttgtccggcaccctgcccacaggctgagctcagccccaggccctttcaggcatctagacactcccatagcctggtcangctggggcaagggagatnccaggtcacacatacttccctggaagagttggacttaggggtaagagccgggtgcacggtanccagncttgctctcattcccang

SEQ ID NO: 5809 - DNA, 440 bp, Homo sapiens; identical to SEQ ID NO: 2672

SEQ ID NO: 5810 - DNA, 427 bp, Homo sapiens; identical to SEQ ID NO: 557
  misc_feature (1)..(427): n=a,t,g or c

SEQ ID NO: 5811 - DNA, 452 bp, Homo sapiens
  misc_feature (1)..(452): n=a,t,g or c
tttgacaggctccagcgtgctgccatgtgatagaagaatgatttattagaacaaattccatgacaaatcatataaaataaccattttccgaaagacagccacaagaccacctgagaacgaatgtacagtgaaccctccgagaagcccggcaaacaaggaccagttcccaggcaaaggctgganggggaggaacaaaggagctcagtgtggggaggagcaggaacttgtgaacttaaaacattgcacagccactgccgaggggtgggaaggagccgtggatgaagccgtgaccacttcatgtccaggggcaggcggggttggggcaactgggncattgcagggggtgggcagcaagccggttggaccggttaagccacctcctccattacagacaggcaggctcttggggccggggaccaggggggggntcacctgncaacccgggcccccct

SEQ ID NO: 5812 - DNA, 291 bp, Homo sapiens
ggccgggcgcggtggctcacgcctgtaatcccagcactttgggaggccgaggcgggtggatcacctgaggtcaggagttcgagaccagcctggccaacatggtgaaaccccgtctctactaaaaatacaaaaattagccgggcgtggtggcgggcgcctgtaatcccagctactcgggaggctgaggcaggagaatcgcttgaacccgggaggcggaggttgcagtgagccgagatcgcgccactgcactccagcctgggcaacaagagcgaaactccgtctcaaaaaaaa

SEQ ID NO: 5813 - DNA, 404 bp, Homo sapiens
agttctccaggaatctaatatgggtgctttttaagaagagagccaccggtctcagctaataatacaattttcacaaataaatccaaaatttaaggtaggattaaaaaggagtaaaccaatacataaaaaatgaaattgagaactgatttaatactaaagttctgaataaaggtgtgcactttatgattgattctatctttttgcacaagttggatactccagtttcccatcccaacatgttgttcgcaatgtgtgagaacgtgatgaaagacgatatccccgtttacacacaaattcaactgattcacctgttctcgaataaagcttctgtttggctgtccaccttaatgctatgttataattttccataatttctcgggatattacacacggatgtaagcatt

SEQ ID NO: 5814 - DNA, 425 bp, Homo sapiens; identical to SEQ ID NO: 3473

SEQ ID NO: 5815 - DNA, 328 bp, Homo sapiens
  misc_feature (1)..(328): n=a,t,g or c
ggcatttccccaacatttaatcaggaaaaaacattccatgaacaaagaaaaactcatgcaactaaagaggagagaacggggggtctgggactgtcagacagggccagattcctcagaggaggcagaagacacagagtagtaaggcacggccgccttggccccacagggcgggcactggacggagcgggcgctgaatggggcggctgaaggagtcggagcaggtgcagacaacacttaggacgtttngcagtaggctcaggaggaggagcgttctagggcccccatgccaangtcaggncctggcacaagcctgagtccagtcctccca

SEQ ID NO: 5816 - DNA, 216 bp, Homo sapiens; identical to SEQ ID NO: 3164
  misc_feature (1)..(216): n=a,t,g or c

SEQ ID NO: 5817 - DNA, 325 bp, Homo sapiens
  misc_feature (1)..(325): n=a,t,g or c
gtacaaaactttgaattttttatttgtgaaattaaaaatatggtattatatatatataanctnctatncctctataaatatagatgattttgtgatagngancagaataaatgtataccaaattcaaagaccaatatcattttagcgtatgacagacatagataaatttaggncctaagtaccggcattttgataaattcttaaagtttaaaacantacaatcaggaggattgcttttctcctcttcttcacagagaactaaagtgaatattttttaaatggctttgaaagatttacatgggacacatttctgtaaatccaaaag

SEQ ID NO: 5818 - DNA, 178 bp, Homo sapiens
  misc_feature (1)..(178): n=a,t,g or c
cacagatatttttaggttttnagtagtggtcccgtcagacacaggcaaggattcaggctcggcctcccatgcgccaccctcgcccaccacactggggccggagcagggcggtcggctgcagcccccgctacttaaaggtggactgcagctccttgaaggccgntttccgctgcttcat

SEQ ID NO: 5819 - DNA, 269 bp, Homo sapiens; identical to SEQ ID NO: 913

SEQ ID NO: 5820 - DNA, 494 bp, Homo sapiens
tttaactgagacagggttttgctctgtctctcaggctgaagtacagtggcacaatcctagctcaagcagttagaataggatttttgaacataattaagcacaataaaataggtaaaataaaatacagtattttccttgaatttttatgttaagtatacatatgtatatgtgtgtgtgtatatatatatatttgtgtatttgtgtgtgtgtttcttctttttagagccagggtctcactttctggtccagggtaggagaccacgcagcatgatcacggctacccttgtccagggtaggaggtccagtagcataatcacagctcactgcagccttgacttgctgggcttgagcaatcctcccaggagatcaaggctgcagtaagccataatcatgcaactgtactccagcctgggcaacagggcaagaccctgtctcaaaaaaataagaacaggccaggcacagtggcatttgaaatgaaagataatcagcaaaac

SEQ ID NO: 5821 - DNA, 355 bp, Homo sapiens
  misc_feature (1)..(355): n=a,t,g or c
ggtaaagacttttaagagaaagaagtattttaaaaagtagcagtgctctgaggctcagggtgtaggatcgggggcacagcatggtcccgggaggccccttgtgcacaggtggtggcccagggcaagntgtctcgctcttgggggacgcgcggccgggggacgcgtcctgtgtccggcccggggctcccagcgggctccggcggcagggacaatggcaaggccgctcaccacttgaggaagaccatcccggccaggacggtgtagcccagcaccaggaagaggaccttgagcagacggtcactcttctcctccagctccttggccaggatctccaggaaggtgatgaagaggaagg

SEQ ID NO: 5822 - DNA, 283 bp, Homo sapiens; identical to SEQ ID NO: 5392

SEQ ID NO: 5823 - DNA, 409 bp, Homo sapiens; identical to SEQ ID NO: 4943

SEQ ID NO: 5824 - DNA, 545 bp, Homo sapiens
tccttgacagtgtaaacactgacattgtactccaggccgggactcaggttatcaaaagtgcaggagctctgatcagcatggaccacttcttccaaagaatttccctgctggccgtttgtaggggttgtggtaattctataaccagtaatgtctggggtggtgctcctctcccaggagactgtgagcactccagtgtcagggtttgcctccagatgcaagtttgttggtggagacaatggtgtcaccactttgtttacaattggcgcatctctttcctgtccatctctcaggacttggatggtgtagacgtattctactcctggagtcaagccggacacaacgatgcttcctgagtctgaagtcacttctcgtggtgcctctcctccctggcttggtcgtacacccagcttaaaaccaattcttggagcaggcgtccatgtgatcacaatggtggtctcagtcacctcggtgttgtaaggtggaatagagctcccaggctgcagtgtggtagagactccagtggctttggggctctcttggttgcc

SEQ ID NO: 5825 - DNA, 376 bp, Homo sapiens
ttattattcatttatttatttattctgagacggagtctcactctgtcgcccaggctgaagtgcagtggcgcgatctcagctcactgcaacctctgcctctagggtccaagcgattctcctgccccagcctccagagcagctgggaccacagacacacaccaccacaccccgccaatctttgcaattccagtagagaccaggcttcaccatattggtcaggccggtccggaactcccgacctcaggggacccacccgccctggcctcccaaagtactgggattacaggagtgaaccaccacacccggctctgcctttctttgacccctcccagactggaccatcttgctactctctccagtcgttttcaccttgatt

SEQ ID NO: 5826 - DNA, 315 bp, Homo sapiens
aattattgagacggagccttgcgctgtcaccgaggctggagtgcactggcactgtcttggctcactgcaacctccgcctcccgggttcaagcgattctcctgcctcagcctcccaagtagctgggattacaggcatgtgccaccatgcccagctaatttttgtatttttagtagaggtgaggtttcagcatgttggccaggctggtcttgaactcctgaccttgtcatcctcccaccttggcctcccaaagtgctgggattacaggcgtgacgaccacggccggctgttatgctcatcatggcacttaagagatg

SEQ ID NO: 5827 - DNA, 449 bp, Homo sapiens
  misc_feature (1)..(449): n=a,t,g or c
ttgtttattgacatacaggtaggctctatagcaacaggcctggnggtnctgcagtagtgggggaaaatggangncggagggtggggncaggtncaaactggagaggcctagagagctagagangcaagtaaggnccagggcagantcggcttcaatggaacaacagcccagtgccctaaggcccctaactcttgctggctgtttcttgaccccaagccagggttgggagtcctctgggcatccatttttnctaaagganctggacagagtacacacaggaaaggaagctttcaccctcttgccatctggctccaggggcctccagtccagcattcctccttcttcccttnattgggtggggccacatgatgggcagccaggctctgggctgttcccactagagcaggctgcaaacacagccatttttcagtgaggcttgatcttcttna

SEQ ID NO: 5828 - DNA, 322 bp, Homo sapiens; identical to SEQ ID NO: 1620
  misc_feature (1)..(322): n=a,t,g or c

SEQ ID NO: 5829 - DNA, 281 bp, Homo sapiens
  misc_feature (1)..(281): n=a,t,g or c
gggggagtanggattttattcaggggtggggacaggcgggcggctcagtagcaggtgccgtccacctccgccatgacaacagacacattgacatgggtgggtttacccgccaagcgtcgaatggtnttctgtgtgaaggccagcgnagggcctcgtggcanccatgcaggagaaggtntcccccttnttccagtcctcggntgccacgcgcagtatgntggtcacaggaaggtgggtgggtgccctggctgggnttcctgccgggatgcccaagttcaggt

SEQ ID NO: 5830 - DNA, 402 bp, Homo sapiens
  misc_feature (1)..(402): n=a,t,g or c
cgcatgagattattttattaaaaaactcaaaggaagcagagtgtggagcggtatctgtccngcgtgacgtctcacatcggagttggctcagaccctggctgtgcatccatcagaaagtgcaaggcccaggccatgagctggggaggaagcctggnaagaaaccaccgctgcaggtcaatggagcctgggactagtgaccaagagttggggcagacccagggcactcacctgacagcttggacccgagcacagagggacgtgcagggtggctcatactcatactgggaaggcagaaccatcacgatgcctctttggggggttcctgaaaggggtatgggtntctgggggaagagctaacaaggaccccaaccccatccaaggctacccatgctccctnccagg

SEQ ID NO: 5831 - DNA, 441 bp, Homo sapiens
tatttttatttacaacagaattggtggctttattcctccatctttagggacacttggcattagcagctagatggaaagtccgcagtgaagtcaaactcattctgccccagccacagctccggaagctcattggctcggtccaaccccagttccaccaccagcgacatcagcacttcctcatccactgggtccgaatcgatgatagcagggctctgggcaccagcagaaggagagagtgattctgcccctcccgcctgggccccaaagtcccagttttgcaggggtcctgcctccccgggttggcctggagtggcagcagcatcccctgatactggctattaagtttctgcagctgcatactagccagcaagtgaggggcggggtgcaggttgaaggattgggggtttagtgggaggggtggttgtaggagagctatttgga

SEQ ID NO: 5832 - DNA, 383 bp, Homo sapiens; identical to SEQ ID NO: 685
  misc_feature (1)..(383): n=a,t,g or c

SEQ ID NO: 5833 - DNA, 488 bp, Homo sapiens; identical to SEQ ID NO: 457
  misc_feature (1)..(488): n=a,t,g or c

SEQ ID NO: 5834 - DNA, 435 bp, Homo sapiens; identical to SEQ ID NO: 1625
  misc_feature (1)..(435): n=a,t,g or c

SEQ ID NO: 5835 - DNA, 366 bp, Homo sapiens; identical to SEQ ID NO: 1184
  misc_feature (1)..(366): n=a,t,g or c

SEQ ID NO: 5836 - DNA, 362 bp, Homo sapiens
  misc_feature (1)..(362): n=a,t,g or c
tttttccagctcaacccttctttaatgtcatccagggaggggncanggnttggaggggaggggttgaggagcgngaggangttatttttgggtggnnttaccacttttcccatgaagaggggaaacttggtattttgttcaatcattaagaagacaaagggtttnttgaacttgacctcgggggggatagacatgggtatggcctctaaaaacatggccccagcagcttcagtccctttctcgtcgatggtcaagcacaaccttattgcacggcttggangagcttcaggggtgctcctctgtgaccccggagaggtcaagccccattnctgaagaccttagtgatgcccagttgacccagg

SEQ ID NO: 5837 - DNA, 364 bp, Homo sapiens
  misc_feature (1)..(364): n=a,t,g or c
tttttttttttttttttttttgctttaagttctttattacagttggattaacactaccacactgaatatactgaattaactattcaaccctttcatccattcagcaaatttaaaactcttgccaagtatcatgaacttacgaagaggagataagagatctgatcttttctgtaggtattccatctccagtttgtcatatctttcccgattactgggatttatccacaganttaggctgaggaaacataaccatccgggggaggcantcgatcagggggctaccaggctagctcgggtcacggatgttttcggagggtttggctggtctggcctgtgggggattaaggcccacctttcaggggga

SEQ ID NO: 5838 - DNA, 317 bp, Homo sapiens
  misc_feature (1)..(317): n=a,t,g or c
gcccatgcatggaatttattgtgtgctactgtttanaaaanactcgaatagnccngcacangcataatatttccaacttagncaggggaccatacagggggcactttctggcaaacaaaacaatagntggttccgctgcctgaagctctgagntgtattccagggcatgagggaagcaggccaccaaagtaaaggggaataccaaactacagtggcaatcaatacagggcaataattgtgaaaaattagcacatggttccctttagtttaaccaagcagttcagtaactatcaaaaggaaaggtttcaaccatgcag

SEQ ID NO: 5839 - DNA, 445 bp, Homo sapiens; identical to SEQ ID NO: 3830
  misc_feature (1)..(445): n=a,t,g or c

SEQ ID NO: 5840 - DNA, 385 bp, Homo sapiens; identical to SEQ ID NO: 776
  misc_feature (1)..(385): n=a,t,g or c

SEQ ID NO: 5841 - DNA, 375 bp, Homo sapiens
  misc_feature (1)..(375): n=a,t,g or c
tcgcagcaattttaattcaatcccacgcccctgtccagcaggaaacccctttatagaaaacccaaatcctcatcttggagtttctccttcagccagggcagcacttgaaagaggttgatgtgaaagtctcgggcgtgannggttacctgcttttgccgnttctggtttttgcagacatccactactccccagctgattacaccaacttgaatgaaacganttctcttgtgaactatcaaggggccgccagantcacctntgcaagtnttggggtcagcatagggactcactcctccagtacaaagggaaccgaggggtgaccacctntgaggatgtcccttgantttgtcatagcctgggggcaatatttgaggc

SEQ ID NO: 5842 - DNA, 420 bp, Homo sapiens
  misc_feature (1)..(420): n=a,t,g or c
ttctccttttccngttcccaagacatgtgcagctcatcatctggccattttctccctgacggtcccacttctctccaatcttgtagttcacaccattgtcatggcaccatctagatgaatcacatctgaaatgaccacttccaaagcctaagcactggcacaacagtttaaagcctgattcagacattcgttcccactcatctccaacggcataatgggaaactgtgtaggggtcaaagcacgagtcatccgtaggttgggttcaagccttcgttgacagagttgcccacgggtaacaacctntttcccgaaccttatgcctctgctgggtcttttcaggtgcctccacttatggatgttgtagggtggggcacctctgggtnagggggcctgtcagaggtggggcactgggtaggaagg

SEQ ID NO: 5843 - DNA, 1201 bp, Homo sapiens; identical to SEQ ID NO: 409

SEQ ID NO: 5844 - DNA, 760 bp, Homo sapiens; identical to SEQ ID NO: 5398

SEQ ID NO: 5845 - DNA, 1105 bp, Homo sapiens
gcgccgcgactcgtgcgggtaggcgtctgcgctcggtttgagggctcggcgcggggtttcctgttccttcttctgcgcggctgcagctcgggacttcggcctgacccagcccccatggcttcagaagagctacagaaagatctagaagaggtaaaggtgttgctggaaaaggctactaggaaaagagtacgtgatgcccttacagctgaaaaatccaagattgagacagaaatcaagaacaagatgcaacagaaatcacagaagaaagcagaacttcttgataatgaaaaaccagctgctgtggttgctcccattacaacgggctatacggtgaaaatcagtaattatggatgggatcagtcagataagtttgtgaaaatctacattaccttaactggagttcatcaagttcccactgagaatgtgcaggtgcatttcacagagaggtcatttgatcttttggtaaagaatctaaatgggaagagttactccatgattgtgaacaatctcttgaaacccatctctgtggaaggcagttcaaaaaaagtcaagactgatacagttcttatattgtgtagaaagaaagtggaaaacacaaggtgggattacctgacccaggttgaaaaggagtgcaaagaaaaagagaagccctcctatgacactgaaacagatcctagtgagggattgatgaatgttctaaagaaaatttatgaagatggagacgatgatatgaagcgaaccattaataaagcctgggtggaatcaagagagaagcaagccaaaggagacacggaattttgagactttaaagtcgttttgggaactgtgatgtgatgtggaaatactgatgtttccagtaagggaatattggtgagctgcatatataaatttgacagatagctatttacatagccttctaagtaaaggcaatgaattctccatttcctactggaggatttatttaaataaaatatgcttattaaacactcctgcaaagatggttttattagtaccctggtcattttgttcaaggaagggttatattgcattctcacgtgaaatataaaaagcaagtcttgcccaataaaaacgctacattgtgtgt

SEQ ID NO: 5846 - DNA, 2497 bp, Homo sapiens; identical to SEQ ID NO: 3969

SEQ ID NO: 5847 - DNA, 1371 bp, Homo sapiens
  misc_feature (1)..(1371): n=a,t,g or c
ctgcaggggggggggggggctgggacagtgaatcgacaatgccgtcttctgtctcgtggggcatcctcctgctggcaggcctgtgctgcctggtccctgtctccctggctgaggatccccagggagatgctgcccagaagacagatacatcccaccatgatcaggatcacccaaccttcaacaagatcacccccaacctggctgagttcgccttcagcctataccgccagctggcacaccagtccaacagcaccaatatcttcttctccccagtgagcatcgctacagcctttgcaatgctctccctggggaccaaggctgacactcacgatgaaatcctggagggcctgaatttcaacctcacggagattccggaggctcagatccatgaaggcttccaggaactcctccgtaccctcaaccagccagacagccagctccagctgaccaccggcaatggcctgttcctcagcgagggcctgaagctagtggataagtttttggaggatgttaaaaagttgtaccactcagaagccttcactgtcaacttcggggacaccgaagaggccaagaaacagatcaacgattacgtggagaagggtactcaagggaaaattgtggatttggtcaaggagcttgacagagacacagtttttgctctggtgaattacatcttctttaaaggcaaatgggagagaccctttgaagtcaaggacaccgaggaagaggacttccacgtggaccaggtgaccaccgtgaaggtgcctatgatgaagcgtttaggcatgtttaacatccagcactgtaagaagctgtccagctgggtgctgctgatgaaatacctgggcaatgccaccgccatcttcttcctgcctgatgaggggaaactacagcacctggaaaatgaactcacccacgatatcatcaccaagttcctggaaaatgaagacagaaggtctgccagcttacatttacccaaactgtccattactggaacctatgatctgaagagcgtcctgggtcaactgggcatcactaaggtcttcagcaatggggctgacctctccggggtcacagaggaggcacccctgaagctctccaaggccgtgcataaggctgtgctgaccatcgacgagaaagggactgaagctgctggggccatgtttttagaggccatacccatgtctatcccccccgaggtcaagttcaacaaaccctttgtcttcttaatgattgaacaaaataccaagtctcccctcttcatgggaaaagtggtgaatcccacccaaaaataactgcctctcgctcctcaacccctcccctccatccctggccccctccctggatgacattaaagaagggttgagctgg

SEQ ID NO: 5848 - DNA, 1352 bp, Homo sapiens
  misc_feature (1)..(1352): n=a,t,g or c
ctgggacagtgaatcgacaatgccgtcttctgtctcgtggggcatcctcctgctggcaggcctgtgctgcctggtccctgtctccctggctgaggatccccagggagatgctgcccagaagacagatacatcccaccatgatcaggatcacccaaccttcaacaagatcacccccaacctggctgagttcgccttcagcctataccgccagctggcacaccagtccaacagcaccaatatcttcttctccccagtgagcatcgctacagcctttgcaatgctctccctggggaccaaggctgacactcacgatgaaatcctggagggcctgaatttcaacctcacggagattccggaggctcagatccatgaaggcttccaggaactcctccgtaccctcaaccagccagacagccagctccagctgaccaccggcaatggcctgttcctcagcgagggcctgaagctagtggataagtttttggaggatgttaaaaagttgtaccactcagaagccttcactgtcaacttcggggacaccgaagaggccaagaaacagatcaacgattacgtggagaagggtactcaagggaaaattgtggatttggtcaaggagcttgacagagacacagtttttgctctggtgaattacatcttctttaaaggcaaatgggagagaccctttgaagtcaaggacaccgaggaagaggacttccacgtggaccaggtgaccaccgtgaaggtgcctatgatgaagcgtttaggcatgtttaacatccagcactgtaagaagctgtccagctgggtgctgctgatgaaatacctgggcaatgccaccgccatcttcttcctgcctgatgaggggaaactacagcacctggaaaatgaactcacccacgatatcatcaccaagttcctggaaaatgaagacagaaggtctgccagcttacatttacccaaactgtccattactggaacctatgatctgaagagcgtcctgggtcaactgggcatcactaaggtcttcagcaatggggctgacctctccggggtcacagaggaggcacccctgaagctctccaaggccgtgcataaggctgtgctgaccatcgacgagaaagggactgaagctgctggggccatgtttttagaggccatacccatgtctatcccccccgaggtcaagttcaacaaaccctttgtcttcttaatgattgaacaaaataccaagtctcccctcttcatgggaaaagtggtgaatcccacccaaaaataactgcctctcgctcctcaacccctcccctccatccctggccccctccctggatgacattaaagaagggttgagctgg

SEQ ID NO: 5849 - DNA, 5067 bp, Homo sapiens
ctcctccccatcctctccctctgtccctctgtccctctgaccctgcactgtcccagcaccatgggacccacctcaggtcccagcctgctgctcctgctactaacccacctccccctggctctggggagtcccatgtactctatcatcacccccaacatcttgcggctggagagcgaggagaccatggtgctggaggcccacgacgcgcaaggggatgttccagtcactgttactgtccacgacttcccaggcaaaaaactagtgctgtccagtgagaagactgtgctgacccctgccaccaaccacatgggcaacgtcaccttcacgatcccagccaacagggagttcaagtcagaaaaggggcgcaacaagttcgtgaccgtgcaggccaccttcgggacccaagtggtggagaaggtggtgctggtcagcctgcagagcgggtacctcttcatccagacagacaagaccatctacacccctggctccacagttctctatcggatcttcaccgtcaaccacaagctgctacccgtgggccggacggtcatggtcaacattgagaacccggaaggcatcccggtcaagcaggactccttgtcttctcagaaccagcttggcgtcttgcccttgtcttgggacattccggaactcgtcaacatgggccagtggaagatccgagcctactatgaaaactcaccacagcaggtcttctccactgagtttgaggtgaaggagtacgtgctgcccagtttcgaggtcatagtggagcctacagagaaattctactacatctataacgagaagggcctggaggtcaccatcaccgccaggttcctctacgggaagaaagtggagggaactgcctttgtcatcttcgggatccaggatggcgaacagaggatttccctgcctgaatccctcaagcgcattccgattgaggatggctcgggggaggttgtgctgagccggaaggtactgctggacggggtgcagaacctccgagcagaagacctggtggggaagtctttgtacgtgtctgccaccgtcatcttgcactcaggcagtgacatggtgcaggcagagcgcagcgggatccccatcgtgacctctccctaccagatccacttcaccaagacacccaagtacttcaaaccaggaatgccctttgacctcatggtgttcgtgacgaaccctgatggctctccagcctaccgagtccccgtggcagtccagggcgaggacactgtgcagtctctaacccagggagatggcgtggccaaactcagcatcaacacacaccccagccagaagcccttgagcatcacggtgcgcacgaagaagcaggagctctcggaggcagagcaggctaccaggaccatgcaggctctgccctacagcaccgtgggcaactccaacaattacctgcatctctcagtgctacgtacagagctcagacccggggagaccctcaacgtcaacttcctcctgcgaatggaccgcgcccacgaggccaagatccgctactacacctacctgatcatgaacaagggcaggctgttgaaggcgggacgccaggtgcgagagcccggccaggacctggtggtgctgcccctgtccatcaccaccgacttcatcccttccttccgcctggtggcgtactacacgctgatcggtgccagcggccagagggaggtggtggccgactccgtgtgggtggacgtcaaggactcctgcgtgggctcgctggtggtaaaaagcggccagtcagaagaccggcagcctgtacctgggcagcagatgaccctgaagatagagggtgaccacggggcccgggtggtactggtggccgtggacaagggcgtgttcgtgctgaataagaagaacaaactgacgcagagtaagatctgggacgtggtggagaaggcagacatcggctgcaccccgggcagtgggaaggattacgccggtgtcttctccgacgcagggctgaccttcacgagcagcagtggccagcagaccgcccagagggcagaacttcagtgcccgcagccagccgcccgccgacgccgttccgtgcagctcacggagaagcgaatggacaaagtcggcaagtaccccaaggagctgcgcaagtgctgcgaggacggcatgcgggagaaccccatgaggttctcgtgccagcgccggacccgtttcatctccctgggcgaggcgtgcaagaaggtcttcctggactgctgcaactacatcacagagctgcggcggcagcacgcgcgggccagccacctgggcctggccaggagtaacctggatgaggacatcattgcagaagagaacatcgtttcccgaagtgagttcccagagagctggctgtggaacgttgaggacttgaaagagccaccgaaaaatggaatctctacgaagctcatgaatatatttttgaaagactccatcaccacgtgggagattctggctgtcagcatgtcggacaagaaagggatctgtgtggcagaccccttcgaggtcacagtaatgcaggacttcttcatcgacctgcggctaccctactctgttgttcgaaacgagcaggtggaaatccgagccgttctctacaattaccggcagaaccaagagctcaaggtgagggtggaactactccacaatccagccttctgcagcctggccaccaccaagaggcgtcaccagcagaccgtaaccatcccccccaagtcctcgttgtccgttccatatgtcatcgtgccgctaaagaccggcctgcaggaagtggaagtcaaggctgccgtctaccatcatttcatcagtgacggtgtcaggaagtccctgaaggtcgtgccggaaggaatcagaatgaacaaaactgtggctgttcgcaccctggatccagaacgcctgggccgtgaaggagtgcagaaagaggacatcccacctgcagacctcagtgaccaagtcccggacaccgagtctgagaccagaattctcctgcaagggaccccagtggcccagatgacagaggatgccgtcgacgcggaacggctgaagcacctcattgtgaccccctcgggctgcggggaacagaacatgatcggcatgacgcccacggtcatcgctgtgcattacctggatgaaacggagcagtgggagaagttcggcctagagaagcggcagggggccttggagctcatcaagaaggggtacacccagcagctggccttcagacaacccagctctgcctttgcggccttcgtgaaacgggcacccagcacctggctgaccgcctacgtggtcaaggtcttctctctggctgtcaacctcatcgccatcgactcccaagtcctctgcggggctgttaaatggctgatcctggagaagcagaagcccgacggggtcttccaggaggatgcgcccgtgatacaccaagaaatgattggtggattacggaacaacaacgagaaagacatggccctcacggcctttgttctcatctcgctgcaggaggctaaagatatttgcgaggagcaggtcaacagcctgccaggcagcatcactaaagcaggagacttccttgaagccaactacatgaacctacagagatcctacactgtggccattgctggctatgctctggcccagatgggcaggctgaaggggcctcttcttaacaaatttctgaccacagccaaagataagaaccgctgggaggaccctggtaagcagctctacaacgtggaggccacatcctatgccctcttggccctactgcagctaaaagactttgactttgtgcctcccgtcgtgcgttggctcaatgaacagagatactacggtggtggctatggctctacccaggccaccttcatggtgttccaagccttggctcaataccaaaaggacgcccctgaccaccaggaactgaaccttgatgtgtccctccaactgcccagccgcagctccaagatcacccaccgtatccactgggaatctgccagcctcctgcgatcagaagagaccaaggaaaatgagggtttcacagtcacagctgaaggaaaaggccaaggcaccttgtcggtggtgacaatgtaccatgctaaggccaaagatcaactcacctgtaataaattcgacctcaaggtcaccataaaaccagcaccggaaacagaaaagaggcctcaggatgccaagaacactatgatccttgagatctgtaccaggtaccggggagaccaggatgccactatgtctatattggacatatccatgatgactggctttgctccagacacagatgacctgaagcagctggccaatggtgttgacagatacatctccaagtatgagctggacaaagccttctccgataggaacaccctcatcatctacctggacaaggtctcacactctgaggatgactgtctagctttcaaagttcaccaatactttaatgtagagcttatccagcctggagcagtcaaggtctacgcctattacaacctggaggaaagctgtacccggttctaccatccggaaaaggaggatggaaagctgaacaagctctgccgtgatgaactgtgccgctgtgctgaggagaattgcttcatacaaaagtcggatgacaaggtcaccctggaagaacggctggacaaggcctgtgagccaggagtggactatgtgtacaagacccgactggtcaaggttcagctgtccaatgactttgacgagtacatcatggccattgagcagaccatcaagtcaggctcggatgaggtgcaggttggacagcagcgcacgttcatcagccccatcaagtgcagagaagccctgaagctggaggagaagaaacactacctcatgtggggtctctcctccgatttctggggagagaagcccaacctcagctacatcatcgggaaggacacttgggtggagcactggcctgaggaggacgaatgccaagacgaagagaaccagaaacaatgccaggacctcggcgccttcaccgagagcatggttgtctttgggtgccccaactgaccacacccccattcc

SEQ ID NO: 5850 - DNA, 1488 bp, Homo sapiens; identical to SEQ ID NO: 1209

SEQ ID NO: 5851 - DNA, 1517 bp, Homo sapiens
gaattccggcgagtgcgcgctcctcctcgcccgccgctaggtccatcccggcccagccaccatgtccatccacttcagctccccggtattcacctcgcgctcagccgccttctcgggccgcggcgcccaggtgcgcctgagctccgctcgccccggcggccttggcagcagcagcctctacggcctcggcgcctcgcggccgcgcgtggccgtgcgctctgcctatgggggcccggtgggcgccggcatccgcgaggtcaccattaaccagagcctgctggccccgctgcggctggacgccgacccctccctccagcgggtgcgccaggaggagagcgagcagatcaaagccctcaacaacaagtttgcctccttcatcgacaaggtgcggtttctggagcagcagaacaagctgctggagaccaagtggacgctgctgcaggagcagaagtcggccaagagcagccgcctcccagacatctttgaggcccagattgctggccttcggggtcagcttgaggcactgcaggtggatgggggccgcctggagcaggggctgcggacgatgcaggatgtggtggaggacttcaagaataagtacgaagatgaaattaaccgccgcacagctgctgagaatgagtttgtggtcctgaagaaggatgtggatgctgcctacatgagcaaggtggagctggaggccaaggtggatgccctgaatgatgagatcaacttcctcaggaccctcaatgagacggagttgacagagctgcagtcccagatctccgacacatctgtggtgctgtccatggacaacagtcgctccctggacctggacggcatcatcgctgaggtcaaggcacagtatgaggagatggccaaatgcagccgggctgaggctgaagcctggtaccagaccaagtttgagaccctccaggcccaggctgggaagcatggggacgacctccggaatacccggaatgagatttcagagatgaaccgggccatccagaggctgcaggctgagatcgacaacatcaagaaccagcgtgccaagttggaggccgccattgccgaggctgaggagtgtggggagctggcgctcaaggatgctcgtgccaagcaggaggagctggaagccgccctgcagcgggccaagcaggatatggcacggcagctgcgtgagtaccaggaactcatgagcgtgaagctggccctggacatcgagatcgccacctaccgcaagctgctggagggcgaggagagccggttggctggagatggagtgggagccgtgaatatctctgtgatgaattccactggtggcagtagcagtggcggtggcattgggctgaccctcgggggaaccatgggcagcaatgccctgagcttctccagcagtgcgggtcctgggctcctgaaggcttattccatccggaccgcatccgccagtcgcaggagtgcccgcgactgagccgcctcccaccactccactcctccagccaccacccacaatcaca

SEQ ID NO: 5852 - DNA, 1493 bp, Homo sapiens
gaattccggcgagtgcgcgctcctcctcgcccgccgctaggtccatcccggcccagccaccatgtccatccacttcagctccccggtattcacctcgcgctcagccgccttctcgggccgcggcgccaggtgcgcctgagctccgctcgccccggcggccttggcagcagcagcctctacggcctcggcgcctcgcggccgcgcgtggccgtgcgctctgcctatgggggcccggtgggcgccggcatccgcgaggtcaccattaaccagagcctgctggccccgctgcggctggacgccgacccctccctccagcgggtgcgccaggaggagagcgagcagatcaaagccctcaacaacaagtttgcctccttcatcgacaaggtggggtttctggagcagcagaacaagctgctggagaccaagtggacgctgctgcaggagcagaagtcggccaagagcagccgcctcccagacatctttgaggcccagattgctggccttcggggtcagcttgaggcactgcaggtggatgggggccgcctggagcaggggctgcggacgatgcaggatgtggtggaggacttcaagaataagtacgaagatgaaattaaccgccgcacagctgctgagaatgagtttgtggtcctgaagaaggatgtggatgctgcctacatgagcaaggtggagctggaggccaaggtggatgccctgaatgatgagatcaacttcctcaggaccctcaatgagacggagttgacagagctgcagtcccagatctccgacacatctgtggtgctgtccatggacaacagtcgctccctggacctggacggcatcatcgctgaggtcaaggcacagtatgaggagatggccaaatgcagccgggctgaggctgaagcctggtaccagaccaagtttgagaccctccaggcccaggctgggaagcatggggacgacctccggaatacccggaatgagatttcagagatgaaccgggccatccagaggctgcaggctgagatcgacaacatcaagaaccagcgtgccaagttggaggccgccattgccgaggctgaggagtgtggggagctggcgctcaaggatgctcgtgccaagcaggaggagctggaagccgccctgcagcgggccaagcaggatatggcacggcagctgcgtgagtaccaggaactcatgagcgtgaagctggccctggacatcgagatcgccacctaccgcaagctgctggagggcgaggagagccggttggctggagatggagtgggagccgtgaatatctctgtgatgaattccactggtggcagtagcagtggcggtggcattgggctgaccctcgggggaaccatgggcagcaatgccctgagcttctccagcagtgcgggtcctgggctcctgaaggcttattccatccggaccgcatccgccagtcgcaggagtgcccgcgactgagccgcctcccaccactccactcc

SEQ ID NO: 5853 - DNA, 3344 bp, Homo sapiens; identical to SEQ ID NO: 5173

SEQ ID NO: 5854 - DNA, 2533 bp, Homo sapiens; identical to SEQ ID NO: 1639

SEQ ID NO: 5855 - DNA, 10476 bp, Homo sapiens; identical to SEQ ID NO: 5401

SEQ ID NO: 5856 - DNA, 914 bp, Homo sapiens
ccagccaacgagcggaaaatggcagacaatttttcgctccatgatgcgttatctgggtctggaaacccaaaccctcaaggatggcctggcgcatgggggaaccagcctgctggggcagggggctacccaggggcttcctatcctggggcctaccccgggcaggcacccccaggggcttatcctggacaggcacctccaggcgcctaccatggagcacctggagcttatcccggagcacctgcacctggagtctacccagggccacccagcggccctggggcctacccatcttctggacagccaagtgcccccggagcctaccctgccactggcccctatggcgcccctgctgggccactgattgtgccttataacctgcctttgcctgggggagtggtgcctcgcatgctgataacaattctgggcacggtgaagcccaatgcaaacagaattgctttagatttccaaagagggaatgatgttgccttccactttaacccacgcttcaatgagaacaacaggagagtcattgtttgcaatacaaagctggataataactggggaagggaagaaagacagtcggttttcccatttgaaagtgggaaaccattcaaaatacaagtactggttgaacctgaccacttcaaggttgcagtgaatgatgctcacttgttgcagtacaatcatcgggttaaaaaactcaatgaaatcagcaaactgggaatttctggtgacatagacctcaccagtgcttcatataccatgatataatctgaaaggggcagattaaaaaaaaaaaaaaagaatctaaaccttacatgtgtaaaggtttcatgttcactgtgagtgaaaatttttacattcatcaatatccctcttgtaagtcatctacttaataaatattacagtgaaag

SEQ ID NO: 5857 - DNA, 580 bp, Homo sapiens; identical to SEQ ID NO: 4922
  misc_feature (1)..(580): n=a,t,g or c

SEQ ID NO: 5858 - DNA, 2470 bp, Homo sapiens
aatcgcgaaacccggcgagcggcgcgctggctatcgagcgagcggggcggaaccgggagttgcgccgccgctcgggcgccgggctccgtcgcggccgcagccccgcgggtcgccctcccgtgcctcgcccgcggacaccctggccgtggacaccctggccgtgggcacccgcggggcgcggcgcgggcgctgcgcggcggcggcggcggcatgaaggtcacgtcgctcgacggcggccacgtgcgcaagatgctccgcaaggaggcggcggcgcgctgcgtggtgctcgactgccggccctatctggccttcgctgcctcgaacgtgcgcggctcgctcaacgtcaacctcaactcggtggtgctgcggcgggcccggggcggcgcggtgtcggcgcgctacgtgctgcccgacgaggcgcggcgcgcgcggctcctgcaggagggcggcggcggcgtcgcggccgtggtggtgctggaccagggcagccgccactggcagaagctgcgagaggagagcgcgtttgtcgtcctcacctcgctactcgcttgcctacccgccggcccgcgggtctacttcctcaaagggggatatgagactttctactcggaatatcctgagtgttgcgtggatgtaaaacccatttcacaagagaagattgagagtgagagagccctcatcagccagtgtggaaaaccagtggtaaatgtcagctacaggccagcttatgaccagggtggcccagttgaaatccttcccttcctctaccttggaagtgcctaccatgcatccaagtgcgagttcctcgccaacttgcacatcacagccctgctgaatgtctcccgacggacctccgaggcctgcatgacccacctacactacaaatggatccctgtggaagacagccacacggctgacattagctcccactttcaagaagcaatagacttcattgactgtgtcagggaaaagggaggaaaggtcctggtccactgtgaggctgggatctcccgttcacccaccatctgcatggcttaccttatgaagaccaagcagttccgcctgaaggaggccttcgattacatcaagcagaggaggagcatggtctcgcccaactttggcttcatgggccagctcctgcagtacgaatctgagatcctgccctccacgcccaacccccagcctccctcctgccaaggggaggcagcaggctcttcactgataggccatttgcagacactgagccctgacatgcagggtgcctactgcacattccctgcctcggtgctggcaccggtgcctacccactcaacagtctcagagctcagcagaagccctgtggcaacggcccaatcctgctaaaactgggatggaggaatcggcccagccccaagagcaactgtgatttttgtttttaagactcatggacatttcatacctgtgcaatactgaagacctcattctgtcatgctgccccagtgagatagtgagtggtcaccaggcttgcaaatgaacttcagacggacctcagggtaggttctcgggactgaaggaaggccaagccattacgggagcacagcatgtgctgactactgtacttccagacccctgccctcttgggactgcccagtccttgcacctcagagttcgccttttcatttcaagcataagccaataaatacctgcagcaacgtgggagaaagaagttgctggaccaggagaaaaggcagttatgaagccaattcattttgaaggaagcacaatttccaccttattttttgaactttggcagtttcaatgtctgtctctgttgcttcggggcataagctgatcaccgtctagttgggaaagtcaccctacagggtttgtagggacatgatcagcatcctgatttgaaccctgaaatgttgtgtagacaccctcttgggtccaatgaggtagttggttgaagtagcaagatgttggcttttctggattttttttgccatgggttcttcactgaccttggactttggcatgattcttagtcatacttgaacttgtctcattccacctcttctcagagcaactcttcctttgggaaaagagttcttcagatcatagaccaaaaaagtcataccttcgaggtggtagcagtagattccaggaggagaagggtacttgctaggtatcctgggtcagtggcggtgcaaactggtttcctcagctgcctgtccttctgtgtgcttatgtctcttgtgacaattgttttcctccctgcccctggaggttgtcttcaactgtggacttctgggatttgcagattttgcaacgtggtactacttttttttctttttgtctgttagttatttctccaggggaaaaggcaataattttctaagacccgtgtgaatgtgaagaaaagcagtatgttactggttgttgttgttgttcttgttttttatatgtaaaataaaaatagtgaaaggag

SEQ ID NO: 5859 - DNA, 577 bp, Homo sapiens; identical to SEQ ID NO: 4614

SEQ ID NO: 5860 - DNA, 3143 bp, Homo sapiens; identical to SEQ ID NO: 1223

SEQ ID NO: 5861 - DNA, 927 bp, Homo sapiens
ggaagtttaggttaactgtcttaaatttccaaagctgtaatcattattttcattctcaaagtgatggccttgtgttttgctcctctcctccagggccagactgagcccaggttgatttcaggcggacaccaatagactccacagcagctccaggagcccagacaccggcggccagaagcaaggctaggagctgctgcagccatgtcggccctcagcctcctcattctgggcctgctcacggcagtgccacctgccagctgtcagcaaggcctggggaaccttcagccctggatgcagggccttatcgcggtggccgtgttcctggtcctcgttgcaatcgcctttgcagtcaaccacttctggtgccaggaggagccggagcctgcacacatgatcctgaccgtcggaaacaaggcagatggagtcctggtgggaacagatggaaggtactcttcgatggcggccagtttcaggtccagtgagcatgagaatgcctatgagaatgtgcccgaggaggaaggcaaggtccgcagcaccccgatgtaaccttctctgtggctccaaccccaagactcccaggcacatgggatggatgtccagtgctaccacccaagccccctccttctttgtgtggaatctgcaatagtgggctgactccctccagccccatgccggccctacccgcccttgaagtatagccagccaaggttggagctcagaccgtgtctaggttggggctcggctgtggccctggggtctcctgctcagctcagaagagccttctggagaggacagtcagctgagcacctcccatcctgctcacacgtccttccccataactatggaaatggccctaatttctgtgaaataaagactttttgtatttctggggctgaggctcagcaacagcccctcaggcttccaaaa

SEQ ID NO: 5862 - DNA, 1594 bp, Homo sapiens
gagaggaacatgaactgacgagtaaacatgtatggaaattattctcacttcatgaagtttcccgcaggctatggaggctcccctggccacactggctctacatccatgagcccatcagcagccttgtccacagggaagccaatggacagccaccccagctacacagataccccagtgagtgccccacggactctgagtgcagtggggacccccctcaatgccctgggctctccatatcgagtcatcacctctgccatgggcccaccctcaggagcacttgcagcgcctccaggaatcaacttggttgccccacccagctctcagctaaatgtggtcaacagtgtcagcagttcagaggacatcaagcccttaccagggcttcccgggattggaaacatgaactacccatccaccagccccggatctctggttaaacacatctgtgctatctgtggagacagatcctcaggaaagcactacggggtatacagttgtgaaggctgcaaagggttcttcaagaggacgataaggaaggacctcatctacacgtgtcgggataataaagactgcctcattgacaagcgtcagcgcaaccgctgccagtactgtcgctatcagaagtgccttgtcatgggcatgaagagggaagctgtgcaagaagaaagacagaggagccgagagcgagctgagagtgaggcagaatgtgctaccagtggtcatgaagacatgcctgtggagaggattctagaagctgaacttgctgttgaaccaaagacagaatcctatggtgacatgaatatggagaactcgacaaatgaccctgttaccaacatatgtcatgctgctgacaagcagcttttcaccctcgttgaatgggccaagcgtattccccacttctctgacctcaccttggaggaccaggtcattttgcttcgggcagggtggaatgaattgctgattgcctctttctcccaccgctcagtttccgtgcaggatggcatccttctggccacgggtttacatgtccaccggagcagtgcccacagtgctggggtcggctccatctttgacagagttctaactgagctggtttccaaaatgaaagacatgcagatggacaagtcggaactgggatgcctgcgagccattgtactctttaacccagatgccaagggcctgtccaacccctctgaggtggagactctgcgagagaaggtttatgccacccttgaggcctacaccaagcagaagtatccggaacagccaggcaggtttgccaagctgctgctgcgcctcccagctctgcgttccattggcttgaaatgcctggagcacctcttcttcttcaagctcatcggggacacccccattgacaccttcctcatggagatgttggagaccccgctgcagatcacctgagccccaccagccacagcctccccacccaggatgacccctgggcaggtgtgtgtggacccccaccctgcactttcctccacctcccaccctgacccccttcctgtccccaaaatgtgatgcttataataaagaaaacctttctacaaaaaaaaaaaaaaaaaaaaaaccggaattc

SEQ ID NO: 5863 - DNA, 233 bp, Homo sapiens
aacattaggaaaagaagtaaaaaaaaacttgtatggaattcctacgtagtcaattgtctaataggttttgtttatggtacttcagagttgctcaaactatgaaacctaaaatacaacacagtgacttttctcttgagttggcacatctaaatgaacaattcacaaatgtcattaaaaggtactgtttgagaaatacatatttaaaattaaaatgcatcaaaagatatgaaatc

SEQ ID NO: 5864 - DNA, 577 bp, Homo sapiens; identical to SEQ ID NO: 4619

SEQ ID NO: 5865 - DNA, 853 bp, Homo sapiens; identical to SEQ ID NO: 2037

SEQ ID NO: 5866 - DNA, 1915 bp, Homo sapiens; identical to SEQ ID NO: 5404

SEQ ID NO: 5867 - DNA, 8448 bp, Homo sapiens
gcagtggtttctcctccttcctcccaggaagggccaggaaaatggccctggtcctggagatcttcaccctgctggcctccatctgctgggtgtcggccaatatcttcgagtaccaggttgatgcccagccccttcgtccctgtgagctgcagagggaaacggcctttctgaagcaagcagactacgtgccccagtgtgcagaggatggcagcttccagactgtccagtgccagaacgacggccgctcctgctggtgtgtgggtgccaacggcagtgaagtgctgggcagcaggcagccaggacggcctgtggcttgtctgtcattttgtcagctacagaaacagcagatcttactgagtggctacattaacagcacagacacctcctacctccctcagtgtcaggattcaggggactacgcgcctgttcagtgtgatgtgcagcatgtccagtgctggtgtgtggacgcagaggggatggaggtgtatgggacccgccagctggggaggccaaagcgatgtccaaggagctgtgaaataagaaatcgtcgtcttctccacggggtgggagataagtcaccaccccagtgttctgcggagggagagtttatgcctgtccagtgcaaatttgtcaacaccacagacatgatgatttttgatctggtccacagctacaacaggtttccagatgcatttgtgaccttcagttccttccagaggaggttccctgaggtatctgggtattgccactgtgctgacagccaagggcgggaactggctgagacaggtttggagttgttactggatgaaatttatgacaccatttttgctggcctggaccttccttccaccttcactgaaaccaccctgtaccggatactgcagagacggttcctcgcagttcaatcagtcatctctggcagattccgatgccccacaaaatgtgaagtggagcggtttacagcaaccagctttggtcacccctatgttccaagctgccgccgaaatggcgactatcaggcggtgcagtgccagacggaagggccctgctggtgtgtggacgcccaggggaaggaaatgcatggaacccggcagcaaggggagccgccatcttgtgctgaaggccaatcttgtgcctccgaaaggcagcaggccttgtccagactctactttgggacctcaggctacttcagccagcacgacctgttctcttccccagagaaaagatgggcctctccaagagtagccagatttgccacatcctgcccacccacgatcaaggagctctttgtggactctgggcttctccgcccaatggtggagggacagagccaacagttttctgtctcagaaaatcttctcaaagaagccatccgagcaatttttccctcccgagggctggctcgtcttgcccttcagtttaccaccaacccaaagagactccagcaaaacctttttggagggaaatttttggtgaatgttggccagtttaacttgtctggagcccttggcacaagaggcacatttaacttcagtcaatttttccagcaacttggtcttgcaagcttcttgaatggagggagacaagaagatttggccaagccactctctgtgggattagattcaaattcttccacaggaacccctgaagctgctaagaaggatggtactatgaataagccaactgtgggcagctttggctttgaaattaacctacaagagaaccaaaatgccctcaaattccttgcttctctcctggagcttccagaattccttctcttcttgcaacatgctatctctgtgccagaagatgtggcaagagatttaggtgatgtgatggaaacggtactcgactcccagacctgtgagcagacacctgaaaggctatttgtcccatcatgcacgacagaaggaagctatgaggatgtccaatgcttttccggagagtgctggtgtgtgaattcctggggcaaagagcttccaggctcaagagtcagagatggacagccaaggtgccccacagactgtgaaaagcaaagggctcgcatgcaaagcctcatgggcagccagcctgctggctccaccttgtttgtccctgcttgtactagtgagggacatttcctgcctgtccagtgcttcaactcagagtgctactgtgttgatgctgagggtcaggccattcctggaactcgaagtgcaatagggaagcccaagaaatgccccacgccctgtcaattacagtctgagcaagctttcctcaggacggtgcaggccctgctctctaactccagcatgctacccaccctttccgacacctacatcccacagtgcagcaccgatgggcagtggagacaagtgcaatgcaatgggcctcctgagcaggtcttcgagttgtaccaacgatgggaggctcagaacaagggccaggatctgacgcctgccaagctgctagtgaagatcatgagctacagagaagcagcttccggaaacttcagtctctttattcaaagtctgtatgaggctggccagcaagatgtcttcccggtgctgtcacaatacccttctctgcaagatgtcccactagcagcactggaagggaaacggccccagcccagggagaatatcctcctggagccctacctcttctggcagatcttaaatggccaactcagccaatacccggggtcctactcagacttcagcactcctttggcacattttgatcttcggaactgctggtgtgtggatgaggctggccaagaactggaaggaatgcggtctgagccaagcaagctcccaacgtgtcctggctcctgtgaggaagcaaagctccgtgtactgcagttcattagggaaacggaagagattgtttcagcttccaacagttctcggttccctctgggggagagtttcctggtggccaagggaatccggctgaggaatgaggacctcggccttcctccgctcttcccgccccgggaggctttcgcggagtttctgcgtgggagtgattacgccattcgcctggcggctcagtctaccttaagcttctatcagagacgccgcttttccccggacgactcggctggagcatccgcccttctgcggtcgggcccctacatgccacagtgtgatgcgtttggaagttgggagcctgtgcagtgccacgctgggactgggcactgctggtgtgtagatgagaaaggagggttcatccctggctcactgactgcccgctctctgcagattccacagtgcccgacaacctgcgagaaatctcgaaccagtgggctgctttccagttggaaacaggctagatcccaagaaaacccatctccaaaagacctgttcgtcccagcctgcctagaaacaggagaatatgccaggctgcaggcatcgggggctggcacctggtgtgtggaccctgcatcaggagaagagttgcggcctggctcgagcagcagtgcccagtgcccaagcctctgcaatgtgctcaagagtggagtcctctctaggagagtcagcccaggctatgtcccagcctgcagggcagaggatgggggcttttccccagtgcaatgtgaccaggcccagggcagctgctggtgtgtcatggacagcggagaagaggtgcctgggacgcgcgtgaccgggggccagcccgcctgtgagagcccgcggtgtccgctgccattcaacgcgtcggaggtggttggtggaacaatcctgtgtgagacaatctcgggccccacaggctctgccatgcagcagtgccaattgctgtgccgccaaggctcctggagcgtgtttccaccagggccattgatatgtagcctggagagcggacgctgggagtcacagctgcctcagccccgggcctgccaacggccccagctgtggcagaccatccagacccaagggcactttcagctccagctcccgccgggcaagatgtgcagtgctgactacgcgggtttgctgcagactttccaggttttcatattggatgagctgacagcccgcggcttctgccagatccaggtgaagacttttggcaccctggtttccattcctgtctgcaacaactcctctgtgcaggtgggttgtctgaccagggagcgtttaggagtgaatgttacatggaaatcacggcttgaggacatcccagtggcttctcttcctgacttacatgacattgagagagccttggtgggcaaggatctccttgggcgcttcacagatctgatccagagtggctcattccagcttcatctggactccaagacgttcccagcggaaaccatccgcttcctccaaggggaccactttggcacctctcctaggacacggtttgggtgctcggaaggattctaccaagtcttgacaagtgaggccagtcaggacggactgggatgcgttaagtgccatgaaggaagctattcccaagatgaggaatgcattccttgtcctgttggattctaccaagaacaggcagggagcttggcctgtgtcccatgtcctgtgggcagaacgaccatttctgccggagctttcagccagactcactgtgtcactgactgtcagaggaacgaagcaggcctgcaatgtgaccagaatggccagtatcgagccagccagaaggacaggggcagtgggaaggccttctgtgtggacggcgaggggcggaggctgccatggtgggaaacagaggcccctcttgaggactcacagtgtttgatgatgcagaagtttgagaaggttccagaatcaaaggtgatcttcgacgccaatgctcctgtggctgtcagatccaaagttcctgattctgagttccccgtgatgcagtgcttgacagattgcacagaggacgaggcctgcagcttcttcaccgtgtccacgacggagccagagatttcctgtgatttctatgcttggacaagtgacaatgttgcctgcatgacttctgaccagaaacgagatgcactggggaactcaaaggccaccagctttggaagtcttcgctgccaggtgaaagtgaggagccatggtcaagattctccagctgtgtatttgaaaaagggccaaggatccaccacaacacttcagaaacgctttgaacccactggtttccaaaacatgctttctggattgtacaaccccattgtgttctcagcctcaggagccaatctaaccgatgctcacctcttctgtcttcttgcatgcgaccgtgatctgtgttgcgatggcttcgtcctcacacaggttcaaggaggtgccatcatctgtgggttgctgagctcacccagtgtcctgctttgtaatgtcaaagactggatggatccctctgaagcctgggctaatgctacatgtcctggtgtgacatatgaccaggagagccaccaggtgatattgcgtcttggagaccaggagttcatcaagagtctgacacccttagaaggaactcaagacacctttaccaattttcagcaggtttatctctggaaagattctgacatggggtctcggcctgagtctatgggatgtagaaaaaacacagtgccaaggccagcatctccaacagaagcaggtttgacaacagaacttttctcccctgtggacctcaaccaggtcattgtcaatggaaatcaatcactatccagccagaagcactggcttttcaagcacctgttttcagcccagcaggcaaacctatggtgcctttctcgttgtgtgcaggagcactctttctgtcagctcgcagagataacagagagtgcatccttgtacttcacctgcaccctctacccagaggcacaggtgtgtgatgacatcatggagtccaatacccagggctgcagactgatcctgcctcagatgccaaaggccctgttccggaagaaagttatactggaagataaagtgaagaacttttacactcgcctgccgttccaaaaactgatggggatatccattagaaataaagtgcccatgtctgaaaaatctatttctaatgggttctttgaatgtgaacgacggtgcgatgcggacccatgctgcactggctttggatttctaaatgtttcccagttaaaaggaggagaggtgacatgtctcactctgaacagcttgggaattcagatgtgcagtgaggagaatggaggagcctggcgcattttggactgtggctctcctgacattgaagtccacacctatcccttcggatggtaccagaagcccattgctcaaaataatgctcccagtttttgccctttggttgttctgccttccctcacagagaaagtgtctctggaatcgtggcagtccctggccctctcttcagtggttgttgatccatccattaggcactttgatgttgcccatgtcagcactgctgccaccagcaatttctctgctgtccgagacctctgtttgtcggaatgttcccaacatgaggcctgtctcatcaccactctgcaaacccaactcggggctgtgagatgtatgttctatgctgatactcaaagctgcacacatagtctgcagggtcggaactgccgacttctgcttcgtgaagaggccacccacatctaccggaagccaggaatctctctgctcagctatgaggcatctgtaccttctgtgcccatttccacccatggccggctgctgggcaggtcccaggccatccaggtgggtacctcatggaagcaagtggaccagttccttggagttccatatgctgccccgcccctggcagagaggcacttccaggcaccagagcccttgaactggacaggctcctgggatgccagcaagccaagggccagctgctggcagccaggcaccagaacatccacgtctcctggagtcagtgaagattgtttgtatctcaatgtgttcatccctcagaatgtggcccctaacgcgtctgtgctggtgttcttccacaacaccatggacagggaggagagtgaaggatggccggctatcgacggctccttcttggctgctgttggcaacctcatcgtggtcactgccagctaccgagtgggtgtcttcggcttcctgagttctggatccggagaggtgagtggcaactgggggctgctggaccaggtggcggctctgacctgggtgcagacccacatccgaggatttggcggggaccctcggcgcgtgtccctggcagcagaccgtggcggggctgatgtggccagcatccaccttctcacggccagggccaccaactcccaacttttccggagagctgtgctgatgggaggctccgcactctccccggccgccgtcatcagccatgagagggctcagcagcaggcaattgctttggcaaaggaggtcagttgccccatgtcatccagccaagaagtggtgtcctgcctccgccagaagcctgccaatgtcctcaatgatgcccagaccaagctcctggccgtgagtggccctttccactactggggtcctgtgatcgatggccacttcctccgtgagcctccagccagagcactgaagaggtctttatgggtagaggtcgatctgctcattgggagttctcaggacgacgggctcatcaacagagcaaaggctgtgaagcaatttgaggaaagtcgaggccggaccagtagcaaaacagccttttaccaggcactgcagaattctctgggtggcgaggactcagatgcccgcgtcgaggctgctgctacatggtattactctctggagcactccacggatgactatgcctccttctcccgggctctggagaatgccacccgggactactttatcatctgccctataatcgacatggccagtgcctgggcaaagagggcccgaggaaacgtcttcatgtaccatgctcctgaaaactacggccatggcagcctggagctgctggcggatgttcagtttgccttggggcttcccttctacccagcctacgaggggcagttttctctggaggagaagagcctgtcgctgaaaatcatgcagtacttttcccacttcatcagatcaggaaatcccaactacccttatgagttctcacggaaagtacccacatttgcaaccccctggcctgactttgtaccccgtgctggtggagagaactacaaggagttcagtgagctgctccccaatcgacagggcctgaagaaagccgactgctccttctggtccaagtacatctcgtctctgaagacatctgcagatggagccaagggcgggcagtcagcagagagtgaagaggaggagttgacggctggatctgggctaagagaagatctcctaagcctccaggaaccaggctctaagacctacagcaagtgaccagcccttgagctccccaaaaacctcacccgaggctgcccactatggtcatctttttctctaaaatagttacttaccttcaataaagtatctacatgcggtg

SEQ ID NO: 5868 - DNA, 607 bp, Homo sapiens
ggactgttgaagacaggtctccacacacagctccagcagccacatttgcaaccttggccatctgtccagaacctgctcccacctcaggcccaggccaaccgtgcactgctgcaatgggctctgagctggagacggcgatggagaccctcatcaacgtgttccacgcccactcgggcaaagagggggacaagtacaagctgagcaagaaggagctgaaagagctgctgcagacggagctctctggcttcctggatgcccagaaggatgtggatgctgtggacaaggtgatgaaggagctagacgagaatggagacggggaggtggacttccaggagtatgtggtgcttgtggctgctctcacagtggcctgtaacaatttcttctgggagaacagttgagcagacagccacattgggcagcgcccttcctctccaccctcccagacctgcctcttccccctgcttccacctcaccccacttatccctctccataaccccacccttgcccaccccacccccacccccaccaagggcgcaagagtagcggtccaagcctgcaactcatctttcattaaaggcttctctctcaccagcaaaaaaaaaaaaa

SEQ ID NO: 5869 - DNA, 4244 bp, Homo sapiens; identical to SEQ ID NO: 4621

SEQ ID NO: 5870 - DNA, 3151 bp, Homo sapiens
ccggccagcgggcgggctccccagccaggccgctgcacctgtcaggggaacaagctggaggagcaggaccctagacctctgcagcccataccaggtctcatggaggggaacaagctggaggagcaggactctagccctccacagtccactccagggctcatgaaggggaacaagcgtgaggagcaggggctgggccccgaacctgcggcgccccagcagcccacggcggaggaggaggccctgatcgagttccaccgctcctaccgagagctcttcgagttcttctgcaacaacaccaccatccacggcgccatccgcctggtgtgctcccagcacaaccgcatgaagacggccttctgggcagtgctgtggctctgcacctttggcatgatgtactggcaattcggcctgcttttcggagagtacttcagctaccccgtcagcctcaacatcaacctcaactcggacaagctcgtcttccccgcagtgaccatctgcaccctcaatccctacaggtacccggaaattaaagaggagctggaggagctggaccgcatcacagagcagacgctctttgacctgtacaaatacagctccttcaccactctcgtggccggctcccgcagccgtcgcgacctgcgggggactctgccgcaccccttgcagcgcctgagggtcccgcccccgcctcacggggcccgtcgagcccgtagcgtggcctccagcttgcgggacaacaacccccaggtggactggaaggactggaagatcggcttccagctgtgcaaccagaacaaatcggactgcttctaccagacatactcatcaggggtggatgcggtgagggagtggtaccgcttccactacatcaacatcctgtcgaggctgccagagactctgccatccctggaggaggacacgctgggcaacttcatcttcgcctgccgcttcaaccaggtctcctgcaaccaggcgaattactctcacttccaccacccgatgtatggaaactgctatactttcaatgacaagaacaactccaacctctggatgtcttccatgcctggaatcaacaacggtctgtccctgatgctgcgcgcagagcagaatgacttcattcccctgctgtccacagtgactggggcccgggtaatggtgcacgggcaggatgaacctgcctttatggatgatggtggctttaacttgcggcctggcgtggagacctccatcagcatgaggaaggaaaccctggacagacttgggggcgattatggcgactgcaccaagaatggcagtgatgttcctgttgagaacctttacccttcaaagtacacacagcaggtgtgtattcactcctgcttccaggagagcatgatcaaggagtgtggctgtgcctacatcttctatccgcggccccagaacgtggagtactgtgactacagaaagcacagttcctgggggtactgctactataagctccaggttgacttctcctcagaccacctgggctgtttcaccaagtgccggaagccatgcagcgtgaccagctaccagctctctgctggttactcacgatggccctcggtgacatcccaggaatgggtcttccagatgctatcgcgacagaacaattacaccgtcaacaacaagagaaatggagtggccaaagtcaacatcttcttcaaggagctgaactacaaaaccaattctgagtctccctctgtcacgatggtcaccctcctgtccaacctgggcagccagtggagcctgtggttcggctcctcggtgttgtctgtggtggagatggctgagctcgtctttgacctgctggtcatcatgttcctcatgctgctccgaaggttccgaagccgatactggtctccaggccgagggggcaggggtgctcaggaggtagcctccaccctggcatcctcccctccttcccacttctgcccccaccccatgtctctgtccttgtcccagccaggccctgctccctctccagccttgacagcccctccccctgcctatgccaccctgggcccccgcccatctccagggggctctgcaggggccagttcctccacctgtcctctgggggggccctgagagggaaggagaggtttctcacaccaaggcagatgctcctctggtgggagggtgctggccctggcaagattgaaggatgtgcagggcttcctctcagagccgcccaaactgccgttgatgtgtggaggggaagcaagatgggtaagggctcaggaagttgctccaagaacagtagctgatgaagctgcccagaagtgccttggctccagccctgtaccccttggtactgcctctgaacactctggtttccccacccaactgcggctaagtctctttttcccttggatcagccaagcgaaacttggagctttgacaaggaactttcctaagaaaccgctgataaccaggacaaaacacaaccaagggtacacgcaggcatgcacgggtttcctgcccagcgacggcttaagccagcccccgactggcctggccacactgctctccagtagcacagatgtctgctcctcctcttgaacttgggtgggaaaccccacccaaaagccccctttgttacttaggcaattccccttccctgactcccgagggctagggctagagcagacccgggtaagtaaaggcagacccagggctcctctagcctcatacccgtgccctcacagagccatgccccggcacctctgccctgtgtctttcatacctctacatgtctgcttgagatatttcctcagcctgaaagtttccccaaccatctgccagagaactcctatgcatcccttagaaccctgctcagacaccattacttttgtgaacgcttctgccacatcttgtcttccccaaaattgatcactccgccttctcctgggctcccgtagcacactataacatctgctggagtgttgctgttgcaccatactttcttgtacatttgtgtctcccttcccaactagactgtaagtgccttgcggtcagggactgaatcttgcccgtttatgtatgctccatgtctagcccatcatcctgcttggagcaagtaggcaggagctcaataaatgtttgttgcatgaaaaaaaaaaaaaaaaaa

SEQ ID NO: 5871 - DNA, 1130 bp, Homo sapiens; identical to SEQ ID NO: 2048

SEQ ID NO: 5872 - DNA, 481 bp, Homo sapiens
tctccttgccgggtcagccctgacaaaggtcagctagccccttgaggacatcagctttggcctcagggtcctaatggcagcagaaccactgacagagctagaggagtccattgagaccgtggtcaccaccttcttcacctttgcaaggcaggagggccggaaggatagcctcagcgtcaacgagttcaaagagctggttacccagcagttgccccatctgctcaaggatgtgggctctcttgatgagaagatgaagagcttggatgtgaatcaggactcggagctcaagttcaatgagtactggagattgattggggagctggccaaggaaatcaggaagaagaaagacctgaagatcaggaagaagtaaagccgcctggctgagatggggtgggcagggcagagctgatcagggccgagcagaaccgcactcttcccaaataaagcttcctccttgaaaaaaaaaaaaaaaaaaaaaaaa

SEQ ID NO: 5873 - DNA, 1360 bp, Homo sapiens
cgggggttgctccgtccgtgctccgcctcgccatgacttcctacagctatcgccagtcgtcggccacgtcgtccttcggaggcctgggcggcggctccgtgcgttttgggccgggggtcgcttttcgcgcgcccagcattcacgggggctccggcggccgcggcgtatccgtgtcctccgcccgctttgtgtcctcgtcctcctcggggggctacggcggcggctacggcggcgtcctgaccgcgtccgacgggctgctggcgggcaacgagaagctaaccatgcagaacctcaacgaccgcctggcctcctacctggacaaggtgcgcgccctggaggcggccaacggcgagctagaggtgaagatccgcgactggtaccagaagcaggggcctgggccctcccgcgactacagccactactacacgaccatccaggacctgcgggacaagattcttggtgccaccattgagaactccaggattgtcctgcagatcgacaacgcccgtctggctgcagatgacttccgaaccaagtttgagacggaacaggctctgcgcatgagcgtggaggccgacatcaacggcctgcgcagggtgctggatgagctgaccctggccaggaccgacctggagatgcagatcgaaggcctgaaggaagagctggcctacctgaagaagaaccatgaggaggaaatcagtacgctgaggggccaagtgggaggccaggtcagtgtggaggtggattccgctccgggcaccgatctcgccaagatcctgagtgacatgcgaagccaatatgaggtcatggccgagcagaaccggaaggatgctgaagcctggttcaccagccggactgaagaattgaaccgggaggtcgctggccacacggagcagctccagatgagcaggtccgaggttactgacctgcggcgcacccttcagggtcttgagattgagctgcagtcacagctgagcatgaaagctgccttggaagacacactggcagaaacggaggcgcgctttggagcccagctggcgcatatccaggcgctgatcagcggtattgaagcccagctggcggatgtgcgagctgatagtgagcggcagaatcaggagtaccagcggctcatggacatcaagtcgcggctggagcaggagattgccacctaccgcagcctgctcgagggacaggaagatcactacaacaatttgtctgcctccaaggtcctctgaggcagcaggctctggggcttctgctgtcctttggagggtgtcttctgggtagagggatgggaaggaagggacccttacccccggctcttctcctgacctgccaataaaaatttatggtccaaggg

SEQ ID NO: 5874 - DNA, 1635 bp, Homo sapiens
aaaggaagagaaagggagagagggagagaagagggagagagcagagagacctcaccgagagagctgcaaaaccagcctggaaaaattagagtattacctaacattagtgaaaaataaaggtactttcttgagaagcccttggacccattctgcctcctggagttctgaacttttcactcactgcctattaattaatgttaagcctgcaaagaatggagttgtcctggatatttggccaaaaaaaaaatgtatccacaaacagggacgtaatcaggcagggagcctcgttaagaagttttgttcttgtcctaggagtgatgagagatcactgaaggatttagagaggggctgtatcatcaggcttgggttccaaagcctcactgagagagttggggagctgactgatgtcagatgctcgtgcagccgccccgtagggcctgtatttcctccatggtgcctcactgcagcaccgagcttgcaaaagatcctctctctttatgggaatttcaaaacagaagcaaaatagcaccggggcttaaagcattcttgggaatttccctgtctttccctctaaataatcagcatgtaaattgcaaaaaaaaaaaaaaaaaaaaaagacacgggcccaaaagggagcgctcagtttcaggctctttgctttccttcctcccgaggctctctggcccttacccagcctgaaaacaaaaagtgtgagggggagggtaggaaggtagttcaagcagggcaatgctgagcctgggaagaaaacaacagccttgtttagggcactgtggcttacgtaactaaattgtgcccagtttccacctggccaggggcctggagtgaatgctgaagatgcaaaggtagaggctgccagaaaagccaggaaattgctggcaagaaaggccagtggtggggtgcaggagtgggaggaaggctgggaaatgcggctgagtcacatctccagaagccccccatcatcaccctagtggctcttctgctggcaggcgcctcatgaagacctgacccaaagttttcaaaactctgcggtttctcaaccctcctctggtaatccatagtactcccccgcctccacttgccagcctcgtgattccttcatggacacatagctcagttcccataaaagggctggtttgccgcgtgggggagtggagtgggacaggtatataaaggaagtacagggcctggggaagaggccctgtctaggtagctggcaccaggagccgtgggcaagggaagaggccacaccctgccctgctctgctgcagccagaatgggtgtgaaggcgtctcaaacaggtatctgggctagccaaggttaatccatcagagttgtgggttttcaggcccagacagcccgcagagccatctgcctgctgggtgagggactaagggagtgggcagagggggaggagaagcagagccaggggagggactgaggctgcaaccaggaggtgggggtgggggagtgggtctcagttgcttgggggagggagcagggcggaagggcaggatgcacttgcaggggtctcatcctggatttctcttcaggctttgtggtcctggtgctgctccagtgctgtgagtaatccctccacctccacttttaagtcca

SEQ ID NO: 5875 - DNA, 23822 bp, Homo sapiens
gatctctggggacctgcctggcagtgggtcaaataaataaagggagttggagctcccggagggtaggactaggggttgagtaggagccggcgggctcgggcagggcgggtcccttggggtttccaactccgcgggcggcgcagtgccccgcaggcctcgcttccactggggaattccgggcggggtgcgggcggcggggcgggggcgggccggggcggggccggtaggccgcctataagatgggtggcgcgcccgcccgggccactcgccgcagcctgcgcgccttctccagtccgcggtgccatggcccccgcccgtctgttcgcgctgctgctgttcttcgtaggcggagtcgccgagtcggtgggtgcttggaggttcccgggctgggggcgaagcgggggcgcaggccggtgcctcctttgttcgtcggagcgtgggatgggggggtcagatcgggggtacgctacccccaaccgtacaccgaggcccgggaaactttgttggaaactttgctccggggtcacgggccagctccgggatggcttcacgcgccgtgcgcccctcgcctgttgctcttcccgcctccccgggcctcagccccgccgcgggctacgggctcgttagtgactaagccggtgtcaactcttcaactcccacaccctcgtcccttccctggtgaccctggggcaggcttggagcgctgaatcccctcctcgctctcggggcgcccagagcagacagctttaggatccgagatggccctgggggtcggggggctgcgtgtactcggaagggggagggttttagggttgtgcgaggccctctttcacacaccaaggagaactgagccctaacctcagttctggccccagctctgtcattgacttgtgacttagggcaaaagtcctgcccttctgaatctcttcccaatactgcaccaagggtctgagggaatggggcaagaggggacactgcgttagggtttctagaaagttggggactctgctcttttcgaggacagaggagaggaatggtttagactcaacacttagccaggagctgagcctctgctttctgcaagaagtgtgttcattttttctcaattgcagataagaaaattgaagcatccaccttgagtgaggtgaagggggtaggggggagagaaggcctcaatcagcccagggaaacctttccttctcactgtccactggcctccgtcatagctgtccctgggccagcagaagctctatccatgcccgcagccggcttaggaggaggggggcaatctcatctgggaagttggggggcatgggaattactggtgaaggcaatctgtcccccacagcctgagctttgtgccccctttgtgccctttagccccagttttcagagcgagtgagtccttgcagtttaaccattaatgttaatttctttgaaagccttggggctcctgttcctctgaatttacttagcggaaggttgattctgcctgcaggctcttcttgaggaatgaatgagaccctaggcaatacttccagcacaattccaggcatgccatgatgattgcaaacgtggagcgcctttgtcggggggccagacattgctctaataactttctaatgggtatatcaaggagcttaattccaacaacaatctgactgtgtactgttcttaaactggtcctgaggctagagaggttaagtaacttgcccagggtcacacagttaatacacaataaatgggtgagtcagattgaaatttaggcagccaggctttcaagtttctgctttagcttaacttctactctttgtgctactccaggtgtcccatcgttggtaactaaagacgggtttagaataggttgagattttatgctggaaggcaaaggaattctgaggtggaaggaaacaaggccagagtgaggtgatgacttaacctaaaccaaaggctaccttgcctaaaatgttagtggctgaggacccaagccttctgcctctagcacagtgctctaaactaggccctgaaggatgtgtcgggtcaagcaactggggaagcatccgaaggataccacctaggcagtacagggaaaaagaggaaaggacccaggaggttgctgaggtcaccgtgtgcccagtcacatgccagtttcctccagggctgctgagccttcaggtgcttcagggtgctgagctgtcagctgtgtcctgggggcattctgaaggatgtagtttgggggaaggggactgtgtcagtcctgcctgggtgacccatcagctgcaggagacatcagccctgggcagctgcttcctgagataggtgtcaagtctcatcctgacctcagctctccccttcctggctaatgtcacagacctcctgcctgtaactggggcacagggcttcccctttggcctgtcccctccctcttttctagattgtggttggaaaaatcagacatagtcacggttggctcggactgaagagatgatccagcgtgtccttttctttttgcaggtagagaaaagtgaggcccagggagaaggactttgctaatagcagttaggagtgatagagtactttttatatgacagatctggtgcattttgtcctcacaaaaagacctgtcacatggggattctattatgcccactttccaaatgtgagaggtaaaatggtactactttgggttagtagagggcatccaggaccccaggatctctgactagtagccctcccattgtgggtggtgttcgcccgactgttccatcattccccttaccacccccatattttggaagggaacccaggctcagtacccagctgtcctctcctctgtttggctgggcttgctatactaaaccagttcttcctgtccagctgggagcattccctgatctgccttcctgccactccctctcaggccaattaaaggcagccttgttttgggagtcccctccacccaaaggtgttcctacccaggggcacagcctactgacttggccccaggccaggcggttgtggggaagtgtcccccacctatcacctatcaagtgtactttagcttaaggacatttctggtcttctacagcgtcctcttcttgattacatgggagtaggggtgggggcggaacgtaggggcttctaggacccttgagtgaacagtgagagctcttgggacttcttgagcccagggagttatcaaacaccccagaaaatatttgggccatgatttggagggttccgtgagttggggggaggcctctttccccgctgggctgacatcccccaccttaaaatgaaaggtttgaacagggtagcctccagagtcctttccatctctcaatttgattaataacttaagtacctactattcaaaagaggtctctctcttgaaggaattaacttgagggaattaacatactccaccaaatgctgaatccctccctctctccccccgcacaccgagggcaggaactctgctctatttgtttttgtgaaatacctgtcccctagtttgtactcaggaaatgcttgtatgaatgaataaattcgtgcatgtaactttattctaaatggttcattaatgttatttattgctagtatgagtatctcccagtactgcgaggtaccattttctctatttttacaggaaattgatgctcggaacaatgcagtggcttcctaaggtcagaaccaggtccttctgatagggcaaggtgtctggtttgagtgtcctcagaatattccagatgaggaaatttcgctgggtttgaaggtagataccttaggtcctacttctgcgttgctgggtgaccttgagcaaacatgccctgtctctgggtctcagtgtccccaactctaaaataaggaggctggaccattgccttccaagggtccttcctgcccagagagcccattgatgaggggaggggccctttgctggcctccttggtgaagagtctaaacaaatcccagtctcagaagagaagttggggtggcggggggacattcagctcctgccatccccagctcctagaaacagagggcttttccaaggacttggagtgctgagcctgcctgaatgaggagctggggaagccaggctgggctcccagcccagctccctgttgggagaaattggctcctagctgtccttcaacctcccggactggacaggcgagtgtgatttccaaatgaatgcttaaaattggggtaaggggctggaccgagcgctgtgagtcactgcatgctagcgtagcctgcctgagtcacccatttcctttcaaactcttggctaataggacagctctgtggtggggggtgttggaatgagctcagagttttaccttgtcctttgggagtcactgtttcagtgtccggggcctcgaggggacatacaggacatgtttgtactaggtcccgccactttcacagccccttgcctgcatgtagactttgacattgtacattgtgcagccagtcctcaaaattgggctttagacctctgcagagcaggtagtacttttttcctctttaaggcaaaactgaggctgcaactggcctgcattttttcagagagcaaaagctggtactgttcaggtttggtgtgaccccaggattttctgatgtttgtgaggactcgtctttgcttcctggggctggccagagggcattgaaacattggcttggtgttacacagacttaactccagacgtgcgaagtccacctcttactggctacatgaattcagtcatgctactccacctctgagccccagcctcctggtctgttaagaagatcatgataccggtgtggcgaagcttaaaggagacgacagggctgtaaataaaggcacctagtaccatgcctggtagggaggaggtgttacttagtgacagttcccttccttgcccaggccaccttcatgccagggggtcctatctctgaagattctgagcccaggtctcctggaaagctttctccatcccccttatcccccttatctacccccacagctgggaggtgggaagggagaaatctagggtggggcttttggagtccaaatctcctatttgtttatcttagaagtgggctgtttgctaattatcgaatgggtttatgtttaaacaagaaccagttctgggcagccccacctctcctgctgggatttgctggagcctcatgctgaacagtttgcagcctggagggagagggggcagggggtttgccaagggtatcagaccactctggacactgtccaggacctggggtcaccctcctgtgctggaggggcagagtttctacccttaaggaggctgagtgattgcaaatagcactttgaggggtggggtgttggtggacagaaaaggtacagtgttctgaaaagccagtttctcgtatgttttcactgcatggtgccctagagagggaggagagagaacacatatgtcaacagttggggtctcatttaaccttagaagaataagcctgacttcttgggcttgtttgtcattaactaacacagtggtgaccttgggcacattcttgcatctcactggggcctctctggtcccatctgctgaaggctgggtgactgaaaaagagggtacagaaaactccagcccccgtcctagctctgctgctcacccagggacacacacagttaatacgtcactttgttgatgtgaactccagtgtcctctataaaacacctgtggcactcaaaggtcatcatcgctgtttggcaaacttgtaaagttctggctttattagcacctagacaagggttcttcacccggccagagtttggctttggggaggtggtgtctgtgcatatgttgaaaatgtaaactaagagttacagttattggggtttagacctttttatccttttcagggggctgcagtactccccaaaaggtcactctgatctcagcagttctttctggctttgacctttctacagctatccttcctccctcccccacttcccagccttgttcttgcctcctgcttcccccaacccccaccttcagcccagaccttcctattcagcggcccccaccccttcaggctgcatctcacccctccccctgtcctccaggcccgggagctcggctgctccagttttctctggcacagtagaagaggctgctggtcaggtgacacctggggtaatggaaaggggaggcagggagaggctggtatgtgtggaaacagtgacttggtgaagcccagcagtcagtggccaggcctgcggggactggcggtgtcactctagcctctgggcgtgggggcagatgtggcacatggctggcccggctacccagagtggggatactccttgccttggagaagccctgccggagccgtctgtgggacagactgacctggtctggaggatggcttccttgggggtcggtgagggaggctgggaagaggcaggaagccagcacccagggctgatctaatcagctgagataaggctgcagcgtgggctctctactctgctctgagaacacaggaggtttgtttacatcccgagagcctccctagccctcggatccagcagggatttcggatctgctgcctagattacaagctccaacttcaatgcacctctgtctctgaggccctgagggagccagccccctcctggctgtctccaccggtaatcggagcaatgcccagcttggttactgggctgggacagagggaggcttgtctctttgagacctgtcttttacagattggaaaactgaggctcagagaagggaattgtccacgatcatccagggagttagtaacaagggtgctgggtcagctcctggcagggagacatccagaggctcctgaacccttcccccatttctagctggcaccctaggatcctggagttcttgctgtgggaatgggctgccctgaggcttggtgaaaagctggttgcaggcagtgcaggcctggctctctcctgagtgattgtgttcagagtaacccgaccttgaaggcgacatttgaaccctcactccacccccacccccagacctggtttaaccattcaggcaccagagcaccagaccatggattggtgtgtagtttctttttaccttctagatttttatttatttattttgtccctggggacccaggtccccaagtagaatttcaggtgtttctggtcactgtcatttgcaccttcggggaaaataaaaatggtctttacctctgtctgcttaggacaggtggtcaaagctgtgtgaccttgggcaggtctctgactatctctgtatctttttttcacagtctgaagggacctgattggttgttgaaagtctctgggctcagaagcaaaatgataacctattatagattatattcctttacagtttgcaaagcaccatctccctgtccccaggctagcttccttccagcaacagaactgcctctgcaagttttcccaggcctctgatcctttgagcactgatcccactggccaggaggaaggcaggtaggggttaatcacagccactattcattgatcacgtgctgggtccttgcacacacaaatgcattcctcttaatcctcatcaccctgcaaggtgctaccagccctagtcacaaaagaggaaactgaggatttcagagatgaaataaactcccaagctcatatagttaggaagtggcagaactcacacttgtgaatctgccttgatgcacaaccactctgggtggtagagtcacagttgtgggccccaggttttagccaggctggggaatgtctggcccttaagaagtgggtggggtggggaagaacagttacgagtagtgtacgctgctgggggtctcctgctagaaatcattctggtgggtccaggtgttggagccccaggtactcaccatcccctctccccactaaatttggcttgccagttattacccttctggtcttgcctcctgaaagaagggtcaagtgtgtccccgaccctacctcccctgggagagccaggtcgggagaggctctcattagttcacagttatccaagccctgaccctgaactcctctctggtgccccagccaagtttctgttcctttgtttaagtgatatcactttcacctttgtttactcctaggcagggacagggttgccctggagccctggcccagccagtgtgttgtggactggcgggttaggctggagagaagtgaagagtgggtggcagtgagaagcctagttgtggttgggacgtgttcttgaggaagatctggatttgaatcccagctctagctttctagttgcatgacgttggataagtgactcagctgaacctcagtcttctcatctgcaaaatgggtagagcaccttgcaaggctgttttgccatttaaatgaacttgtataaacaaagtacccagcatggtgcttggcatgtagtggatactccttttagtcactcatgcttttcctggggtgatagaagccataggatttggggatagggttgggataggaccttttcgtagcttcatgcctatagccaaaagactagatggggagtataactgtaatgacagctgctgcctgtggatttgctgagacccttaggggcagccaacaccctggaaggcgagagaagataattccagtctggagccaggatacctaggttctaagtccatctccgctgccagctgcttggatgaccttggcaaaatcccttgtcttgtctgtttgctaggttataaaatcagataccttctgttggcaggtgttagtttctgtagaacaaaagagcacttcccctcccttctttctccccaacagtctggggaagaatgtagtatctctaaacccccaggcactaatcccagatccccaccagccacagggccagcagagtctgtgggacctaggcccattgccctattttttattttttggagacagggtcttcctctgtcacccaggctggagtgcagtggcacgatcgtagctcactgcaacctcgacctcctgggctcaagtgatcctcccacttcagcctcccgagtagctgggaccacaggcgtgcacaaccacatttggctaatttttgtagagatggggtttcaccatgttgcccaggctgatctcaaactcttgggctcaagtgagcctcccaccttggcctcccaaaatgttgggattaagccactgtgcctagccaccactgtcttacttagttggtaatttctgttgtgtgttcatgaaagggacaaagatacaaggagacttgagagcccagagagggtgcctgtgcatgtatacacactaacacacatgccttgggcaaaggtgggtgagctgaggagaacagaccacattcttagccaggagcagggcgggtccatctctggtcagggctgggcctggctgctgggtggcctggttcttcaaagtcaccccagactcaatgggctttatctgaaaagagggcggaggagaggaggaccgttggtgccttcccaacctttacacaaaaaagagtgattgcccacaatcccacggggcttggtcccgtcttgctggcctagtcctaaatggctcttatccactttggagttgccttccctcttgtcagaggtcatgggtggagaagggaccaaaacagggcagagagggggcttccagagctcaaggagagatttaattccctgtgtcctcctatcaccactgggagctggaagaagtttctttccagccccttgacttgctgtaggagggaaatcctgggctcatctaaatgcagcctttgaagactccatcttttcagagctttgaaataggatcgaatccaggccgtgccgcggagccccggggtgacttcagactagactagtttcttttttggaaactgagtataaaaatgaagggttaaggatgaacaggtgcccacaaagagggctgaactgggaataaatcttggtttcagccttggttttgctgctgacttggctgcaagatcttcacgccccactttcgctcatagccttcatttctctaatgtaaaacggaggtaattcctaacagccagtgggcatgctaatcccatgggttgttttgaaatacctcttagcactttcacatactgaaagagaggctggatgcataaacaaccttccatggctcctgggggcagtgaggggtgggaaaaggtctctcagcctgagacaagtctcctgatggaactacagcccctgttgaggactttgacctggtcaacagctggccaaagtgtaccattctttctttctcccggctagattgacccccctacttaacagggctcccttggagctggggcaggctggtgaccccgtgtacatatgtgttcatgcgtgtgtttatgtgtttgtggttaaatgtccaggtcagtgaagcctgggttctggcccagtgtggctacttcctgcttgtgtggccttggacaagtgactttacttttctgagcccttgtttccatctctgcaaaaagggactattaaaaggacctagacaggctgtgtgcttggttaaggcctgtcacttgggttcttgggggatttgccacaggagatggaggtaggagcacagggaccctgcccttaggtataggcacttgggcagccatgaggagccttcctcctgctctgccaaaccaaagccacaggcacgggctatgtgcgggggcttgaattccagcaccagcagcccggcagctcctgattcccgagtcatgaagtcatctctgagcagcacttaacctctctggctttccacccccacgggtgccaagcgttcagcattctccccactccccgggagagagtgattcctggccactgccttccttgtggcctgaccccgctcccttccgggaatccagcattctccctctgtgggggtggaagagggtgcatgagggtcaggttccacctgcctctccccagaagcccagtggggagagtacaggagtggctctgaagcagctttcctgggcctctcctgcaatgataataaccttatcttagggacagatgttccttctcagacaccctcctttgtcaatggcagtctcagctgagtgaaggactgcctggggtgtccgaaacagagacctgacctctttctatcctgagttatgtagcgaacgctctgtgtgaccttgggcaagtccctcccctgttccgggctcagattcaagttgtgtgaaacgggaggacaggagctccttgggtcctggcattctgtgattctaagcagacccccagctcctgcagttatggcgtctggagaagatgggaatgtctttcagcgggaggggcatggtgtattgaacttaatgaaaaaccccaactctcctggcaaatactaggcactttagtgtttgaattaattagtagaataatgaactttgctcagagctgctgttctctgggcaaacagaagcctgagcccagaagctggaggaagggtgatgggcatccaaatgtttcctgtgctcttgagggtacattgttcccactcggtggagctacaggatgggagcagggtaactgatgtactgtagggctgcccgggacctttgacactttcttttggcaagcggtttggtgggagtggacctgagactctgtcctgatcagctgtgtctccacagggtagtggctgagtgatgattatgggtactggagtggatggtctgtgagggtagggattgtgcctctcggtgtctgcatggtgctggcagcagagtagatctgtgggagatgtttggaaggcaagactgaatccaggagtacactcctgagtcatcaggtctgggcagcgccctgacctgaggctgtcttagggtgtgcgtgaggcagccctgtctgtcccggcccagactgactcagctgggaaaagtatcctggactgggcaagaccagaaccaggagcccactccctgtcctgtgtgaatcagctgccactgcatcacagagccctggagtgtagcatcccagggccctgtgcatggagactcctggctctgaagtcaggcagccctgcgtatgcaatcctcgctcttccatctgccagctgtgtcaccaaaagaaaatgactccctcggctgtaaaaagaagtgaataacatgcctccagagttattaaaacagggcccagcacatagcaagtgctcggtaaaggatatctagccatattaataatttgattattacctcatttactgtttttattttttttgagacgggggtcccactctgtagctcaggctagagtgcaacggcgtgatcctggcttattgcaacctccgcctcccgggttcaagcaattctcctgtctcagcctcccgagtagctgggactacaggcgtaagccaccacgcccagctgatttttgtatttttagtagagacggggtttcaccatgttggcctggcaggtcttgaactcctgacctcaagtgatctgcctgcctccgcctcccaaagtgttgggattacaggtgtgagccactgtgcccagcctcatgtactatttttatttgcccagaatggaaagagacttgcctaaggacacgcggtgagttagaggtagagtgggatccaggacgcaggtctccaggccctggctgtctctttctagtttctgaatgcccacttcactagcttttgggcatcagctgtcatggagcactggggatgttggctgatgtgtctcctttctttatcttagatccgagagactgaggtcatcgacccccaggacctcctagaaggccgatacttctccggagccctaccagacgatgaggatgtagtggggcccgggcaggaatctgatgactttgagctgtctggctctggagatctgggtacggaaggtgtgctgggcaggcgtaggcacaaagctggagggagtggtggcttcaccagccaggagggtgaccatgccttgagacttggatttttgtgggacttttcctagagtgcccttcttcttccttctcaaaaaaaggggaaacaaaagtaatggattaacctattccatcccctgagagcccctggggacaagctgtttgctgctttgaagtcattggtagctctgggttttctgagctccagcctgaacgtgtcctcataagctcttctcttttctgcagggcatggtgggggtggggtgagggtaggatgggtggcaggacagggtgggagtggggaaggaggacccatagagtgttttcctttttttgaaaggaaaagttccaccctgggccacatggtgagaacttgtctctacaaaaacacaaaaattagctggatgtggtggcatgcacctgtaggagtcccagctacttgggaggctgaggtgggacgatcccttgagcctaggaggttggggctgcagtgagccaagatcatgctactgcactccagcctgggtgacagagtgagaccctgtctcaaaacaaaaaaggaaaagtagcagcttagaagtggggatggggtgggagggggcatgagtgggcagagatgtagttgggaaaccaagaacaagtccctgcttcagtgggggtgggggcgggtgaagggcccaaggctctaggccagacagctaataagtgtccctcctatgtgcagagaggtgttaatgattgcaagttttagctttgcaagttttagctttggagtcacatggtcctgagttcaagcctccatcctgtgtgaactgagcttcagttttctaatctgtaaaatgggaataataaagatagtacatcagtgttgtggggactgaactgacttaaagcttttggcacctaccaagcactcagtacgtgtgtgtttggtttaaaaaaaaaataaattttatggccgggcacggtgctcatgccgtgaatcccagcactttgggaggccaaggcaggaggatcacgaggtcaggagtttgagaccagcctggccaacatggtgaaaccccgtctctactaaaaatacaaaaattagccaggtgtggtgtcgagtgcctgtaatcccagctacttgggaggctgaggcaggagaattgcttgaacccgggaggcagaggttgcagtgagctgagatcacgccattgcactccagcctggtgacagagcaagactctgtcttgaaaaaaaataaaaataaaaaaataaatttcattatgtgcatacaacatgatattatgggatacatatagatagtaaaaatgttactacagtggagttaagtaatatatccatcatctcacatagtcgcccaggaaatgttttaatattgcagttagagttttctttctcaaaagttaattccctggggatcttgttaaaatgtagattttggccgggcgcggtggcttacacctgtaattgaagcactgtgggaggccaaggcaggcggatcacaaggtcaagagatcgagaccatcctggccaaccaacatggtgaaaccccgtctctactaaaaatacaaaaatcagctgggtgtcatggtgccaccctgtagtcccagctactcggggggctgaggcaggagaatcgcttgaacccaggaggcagaggttgcagtgagccgagatggcaccacggtactccagcccaggcgacagagagagactctgtctcaaaaaaaaaaaagtagattttgattcagtcagccctgaaattctacatttcttcttcttttttttttaaccaatgaattatttttactctttttaaataagtgaaatattagctttaatgttttctgatcatgacaatatttttagataagaacattttaaacattcaacagtaagagactattgaaaataaatgaaattcattgaatagaagtaattaaaataataatgtaactctttaagcattgtaatggaaagatgttaatgatatattgttacgagcccattattgggaaaaatgtatttaggaatacgtatggagggaatttatttatttatttttttgagacggagtcttgttctgtcgcccaggctggagtgcggtggtaccatcttggcccactgcaacctctgccaaccgggttcaaagtgattctcctgcctcagcctcccaagtagctgggattacaggcgcgtgccatcacccgtggataatttttgtattttcagcagagacggggtttcactatgttggccaggctggtctcgatctcctgacctcaagtgatctgcccgccttggcctcccaaaatgctgggattacaggcgtgagccaccgcgcctggccttgaaattctacatttctaaccagctctcaggtgttgctattggtttttggatccacactttgcagagcaagggtttagagcagatgaagcctctgcccagctgccagctcacacattcctgtgaaagagccagggggtgggtctgaggagccccattttacagatgagatgactgaagtaggggtggggaagctcgcttgctggacattgagcatttggaagctggttgtaaggtggagctcccaccagtcctggctgaaggggtcattttcctggggtaatggacctcactcacacagctattctgaccttacagatgacttggaagactccatgatcggccctgaagttgtccatcccttggtaagtagctacatgcttctgcctcttccactttgctcctctatagcagacctattgggagaggcagaaaatacagcccccataggcagaataagtgaggggtcttaccccactatgcgggaaggctttttaaaaatctggccctggggtgggcatggtggctcaggcctgtaatcccagcactttgggaggcttgaggtcaggagttcaagaccagcctgggcaacacgatgaaacctgtctctacataaaatacaaaaattagccaggtgtggtggcatgtgcctgtagtcccagctacttgagaggctgaggtgggagaatggcttaagtccaggaggcagaggttgcagtgagccaagattgtgccagtgcactccagcctgggtgacagagccagactgtgttaaaacaaacaaacaaacaaacaaatctggccccaggctcattttgtaggttgctggtaggccatcctccctgcagggatagtcaccgtcaacaccaactccttttctctacatttatagctatttcctagcattgatagaaaagtatatatataggccgggcacagtggctaatgcctgtaatcccagcactttgggaggctaagacgggcagatcacctgaggtcaggagttcgagaccagcctggccaacatggtgaaaccctatctctactaaaaatacaaaaaattagcctggcacggtggcgtgcgcctgtagtcccagctacttgattgggaggctgaggtaggaggatcgcttgaacctgagaggcagagattgcagtgggcagagattgcaccattgcaccccagcctgggcgacagagactccctctcaaaaaaaaaaaaaaaaagtatatatatataattctatgaactgcgtttttcacttagactggtcatgagtatttccctgcataatttaatgctcttgtcatttttataggctgcgtaatagtttacctgattccctttattgacggaaaaatggcttataatttgttaacattttaaaattataacactgcagcaaacatcttttttatttttgcaaagcaataacaagtttattaagaaagtaaaggaataaaagaatggctactccataggtagagcagtggcattggctgctggttgcccatttttatggttatttcttgattatatgttaagcaaggggtagattattcatgagttttccaacaaaggggtgggcaattcccagaactaggggctcctcccctttttagaccatatagagtaacttcctgactttgccagggcatttgtaaattgccatggcactgatgggagtgtctcttagcatgctaatgtagtataattagcatataatgagcagtgagaccaacagtttcattgccatcctgtttttggtggtttttggcaagcttctttattgcaacctgttttatcagcaaggtctttatgacctgtatcttgtgcagacctcctatctcattctgttacgtaggatgcttaacttactgggaatgcggcccagcaggtctcagccttattttacccagcccctattcaagatgtaggcactctggttcaaacacctgacattttccccctcccttttgtaagaaaacccttaatcctaagggttgcagagggacaaagatccatcttctataacttcttcatgctgaatagggtgatgatattcctgcttaactattagggcctcttgtatccatggtagagaggggttcagtcagaaagggccagtatggtgagggccattcataactcttagttctgacaaaaggtgatatccaaagtcctccaatcagtgctgcagtccatttcctttgattcgggagtctcctccgtctcatcccttctgtggttctccagaaagatgttaccagaaaggggtcccgatccagaccccaagggagagggttcttggatcttgcacaaggtagaattcagggtgagtccatagagtaaagtgaaagcaagtttattaagacagtaaaggaataaaagaatggctacttcataggcagaggagctgcagcaagcatcttttacacgtagtctctgaagagctccttacaatagagtttccagggcaaaactgccaccttaaagggcaagcgatgtctaaggttttgccaaattgcttccagagtggttgctctagaataaccagtggccagcagtgcaggagagcacctgcttccctgttcccttgggtgcattcatttttcatttgggacagatatactaaaaaagttggggataaggattttggcagcataattgtggagacagtgttgccaattcctgctccaggaccatatggttcagctgaatatggcagaaccagattctctgcctggctgaatgtccctgtcccctgccctgagtctcttccaaaatacgctgagtgtctcttctcctttccgcccatccaggtgcctctagataaccatatccctgagagggcagggtctgggagccaagtccccaccgaacccaagaaactagaggagaatgaggttatccccaagagaatctcacccgttgaagagagtgaggatgtgtccaacaaggtgtcaatgtccagcactgtgcagggcagcaacatctttgagagaacggaggtcctggcaggtaagtcccatgctgcttataagatgccttgaaggtggaatggggctcagcgggggagagcacctgcaggcagggatgcctccagccatgaggctccttggtgccccttccttttgcctattcaggttgccctagaacattgaaagactacaccttccttatggggtggctctgactgtgcagcctggtggagggagaggaaaaagcacctatcaaagtcttctggaaaataggcaattgagtcattcttctgccttaagtctttctcatttattttgcaaaggactttcactgtataagtttggcatctgggagttaatcattaaaagttaatttcccttgtaagtctggaggctccttcgaattgggttagcttcccctccccctactctatcacttggcagccttgtgaccttggctgagaagctttcgaacttgatgagcctcagtttccttatctgtaaaatgggtacagtgataccttctggggttgatataatgagtccatgaaaaataaaatatgaaataactttgcacactataaagggctattccgatttggcctcagttcagagttctttactggaatgtgcggtgaggaatgctttgtcccaggtgttgacaaaagggatggagggaactccccaaggtcatggccgagggcagcctggatgaaccggcctggcaagtgggcaccctgggcccatgctgggtaactcctgtctcctgggaatcaacagagccagcagctccaaggaggcttgagctatagggacagagcctggcttcatccaggacagatggaaggtctcacctgcctcttgtaaagagggttcctgggagcacagcccctgatgactgggcccacctcagccctgaccctggcttcctggtatctgagccaaagttctttttacttttctttcagaagtaaaaagatttgcataagactttggatttgcataaggttttgctctaattaactaaaggtgctattgcttctaaagaaaaatttgaaaaccactgattaatctaagcacctgcttcttatacatggggagactgaggcccaggctttaggccacatagtaagaaaagaactgaagccaggttatctctttaatcttccatttgagaattatacaagcctaagagcctcatgtgaaaagttatattgttagctggtgtggtggaatcccccattccagaagctttaatcagcacccaggagccttattaaatgcttgctgtatgctgtatgattcctgtgcccctgattgagtccgtacaacacaaaactcagtctaaagaacttatccgaagtcacaaagctggaagtggcagacctggcatttggactgaggaccacagtcagcttctgagaatgtgcttgaaacttgaccctgtggggcatcccagcgcagacccagggcctcgtggaggaactggggtcatcagagggaaaggtgatagagacaagaatggggttgatgcctgatattccatgtgcttgctctggcacctcctgggggtacttttttgttgctttttcataggattttacccaagaaagaaccttgcttgactcctctgtgccactctgtccccattgtgtacatagatttgtagtgtgtgcagggatggaaaattaatcttcttagcccgagtaagaccgaattagggaactcaatctgccacagaagggattctatgaagcatccctgcccctagcaaacaggaatgagtcattcaggccacctggcagagtggacaggccagacccactcactgttagaagcccatctctgcccaacactaggcaggttctcctctcggagcctgaaagtatcatttattaagcacctcctgttgtgcacacctgattcagggggttcgggacacagatataaaccttaaacccttacagttaatgaatcttgagaatatgctatgcactaggcattgttctaagcactttgagtggattaatttatttaatccttaggacaaatgtatgagaaaggtatggctcttcccattttgcggtagggagatgaaggaaacttgccccaaatcacacagccaggaagtaggagaggtaggagtggaaaccaggccttagctactgagttctgtatgtaattgtaacataagagtttggaattagtatgttctgcatgtgtgcactttgaatgtacatacctgtctatgaagtgtaggctatataggtaaatatgcacacagggagagctagagagtgccctgtgctaaggactgcaggataaatatgtctacagggatttccatagcctacggttttctcctgttcctggttcagttagtgctagactgttgcaggggagtccgcgtggtgtttggaaagagcctaggctttagattcaggcagatgtgggttaaaatagtggccttggccgagtgcggtggctcacgcctgtaatcccagcactttgggaggccgagatgggcaaggtcaggagttcaagaccagcctggccaacatagtgaaaccctatctctactaaaaatacaaaaattagccgggcatggtggcacgtgcctataatcccagctactcaggaggctgaggcaggagaattgcttgaacctgggaggtggaggttgcagtaagccgagatcacgccactgcactcagctcgggcaacagagtgagacttcgtctcaaaaagaaaaaggagtggccttaccactagccctgtggtcttcagtgacttaaaatgccaacgacccacttcttataactggggtcatgaggtcaacttaaataaggcatcagcttgcctggcacaggcagtggtgatggtgaggatgtctggttgtaagagaactgacagtgggggaaagaggggttcatccttaggtcctgatgaggagctctgacccccgcctcttctctctcctcctctccagctctgattgtgggtggcatcgtgggcatcctctttgccgtcttcctgatcctactgctcatgtaccgtatgaagaagaaggatgaaggcagctatgacctgggcaagaaacccatctacaagaaagcccccaccaatgagttctacgcgtgaagcttgcttgtgggcactggcttggactttagcggggagggaagccaggggattttgaagggtggacattagggtagggtgaggtcaacctaatactgacttgtcagtatctccagctctgattacctttgaagtgttcagaagagacattgtcttctactgttctgccaggttcttcttgagctttgggcctcagttgccctggcagaaaaatggattcaacttggcctttctgaaggcaagactgggattggatcacttcttaaacttccagttaagaatctaggtccgccctcaagcccatactgaccatgcctcatccagagctcctctgaagccagggggctaacggatgttgtgtggagtcctggctggaggtcctcccccagtggccttcctcccttcctttcacagccggtctctctgccaggaaatgggggaaggaactagaaccacctgcaccttgagatgtttctgtaaatgggtacttgtgatcacactacgggaatctctgtggtatatacctggggccattctaggctctttcaagtgacttttggaaatcaaccttttttatttgggggggaggatggggaaaagagctgagagtttatgctgaaatggatttatagaatatttgtaaatctatttttagtgtttgttcgtttttttaactgttcattcctttgtgcagagtgtatatctctgcctgggcaagagtgtggaggtgccgaggtgtcttcattctctcgcacatttccacagcacctgctaagtttgtatttaatggtttttgtttttgtttttgtttgtttcttgaaaatgagagaagagccggagagatgatttttattaattttttttttttttttttttttttactatttatagctttagatagggcctcccttcccctcttctttctttgttctctttcattaaaccccttccccagtttttttttatactttaaaccccgctcctcatggccttggccctttctgaagctgcttcctcttataaaatagcttttgccgaaacatagtttttttttagcagatcccaaaatataatgaaggggatggtgggatatttgtgtctgtgttcttataatatattattattcttccttggttctagaaaaatagataaatatatttttttcaggaaatagtgtggtgtttccagtttgatgttgctgggtggttgagtgagtgaattttcatgtggctgggtgggtttttgcctttttctcttgccctgttcctggtgccttctgatggggctggaatagttgaggtggatggttctaccctttctgccttctgtttgggacccagctggtgttctttggtttgctttcttcaggctctagggctgtgctatccaatacagtaaccacatgcggctgtttaaagttaagccaattaaaatcacataagattaaaaattccttcctcagttgcactaaccacgtttctagaggcgtcactgtatgtagttcatggctactgtactgacagcgagagcatgtccatctgttggacagcactattctagagaactaaactggcttaacgagtcacagcctcagctgtgctgggacgacccttgtctccctgggtaggaggggggggaatgggggagggctgatgaggccccagctggggcctgttgtctgggaccctccctctcctgagaggggaggcctggtggcttagcctgggcaggtcgtgtctcctcctgaccccagtggctgcggtgaggggaaccaccctcccttgctgcaccagtggccattagctcccgtcaccactgcaacccagggtcccagctggctgggtcctcttctgcccccagtgcccttccccttgggctgtgttggagtgagcacctcctctgtaggcacctctcacactgttgtctgttactgattttttttgataaaaagataataaaacctggtactttctaaactgcttgcctctgtcattttcgttcataacaagtcatcctttttgggctctgtatccccttgatctcagtggagcatgaagaaactccccggaccaaatcccctacgggtgccagacatgccgggggtgggcagagggtgggggcagagaggtaagaaggcaggaaggggcctagagaagagggaagacttcagaacatgcaccctgatggcctatgcagcatatcacccctacttcaaggttttgtttaggtggcactgtgtttaaatagcaaacacaaaaatctttgcgtcagttgccatccatagaaatcaggaggtttcacataaaaatccagatttctcacttttcttgggaaaaagaaataaaaaaaattggcaactgtcagcctgcatggcaacaagagagctgctgagtggcaggcacccatctaga

SEQ ID NO: 5876 - DNA, 1804 bp, Homo sapiens
cgctccacctctcaagcagccagcgcctgcctgaatctgttctgccccctccccacccatttcaccaccaccatgacaccgggcacccagtctcctttcttcctgctgctgctcctcacagtgcttacagttgttacaggttctggtcatgcaagctctaccccaggtggagaaaaggagacttcggctacccagagaagttcagtgcccagctctactgagaagaatgctgtgagtatgaccagcagcgtactctccagccacagccccggttcaggctcctccaccactcagggacaggatgtcactctggccccggccacggaaccagcttcaggttcagctgccacctggggacaggatgtcacctcggtcccagtcaccaggccagccctgggctccaccaccccgccagcccacgatgtcacctcagccccggacaacaagccagccccgggctccaccgcccccccagcccacggtgtcacctcggccccggacaccaggccggccccgggctccaccgcccccccagcccatggtgtcacctcggccccggacaacaggcccgccttgggctccaccgcccctccagtccacaatgtcacctcggcctcaggctctgcatcaggctcagcttctactctggtgcacaacggcacctctgccagggctaccacaaccccagccagcaagagcactccattctcaattcccagccaccactctgatactcctaccacccttgccagccatagcaccaagactgatgccagtagcactcaccatagcacggtacctcctctcacctcctccaatcacagcacttctccccagttgtctactggggtctctttctttttcctgtcttttcacatttcaaacctccagtttaattcctctctggaagatcccagcaccgactactaccaagagctgcagagagacatttctgaaatgtttttgcagatttataaacaagggggttttctgggcctctccaatattaagttcaggccaggatctgtggtggtacaattgactctggccttccgagaaggtaccatcaatgtccacgacgtggagacacagttcaatcagtataaaacggaagcagcctctcgatataacctgacgatctcagacgtcagcgtgagtgatgtgccatttcctttctctgcccagtctggggctggggtgccaggctggggcatcgcgctgctggtgctggtctgtgttctggttgcgctggccattgtctatctcattgccttggctgtctgtcagtgccgccgaaagaactacgggcagctggacatctttccagcccgggatacctaccatcctatgagcgagtaccccacctaccacacccatgggcgctatgtgccccctagcagtaccgatcgtagcccctatgagaaggtttctgcaggtaatggtggcagcagcctctcttacacaaacccagcagtggcagccacttctgccaacttgtaggggcacgtcgcccgctgagctgagtggccagccagtgccattccactccactcaggttcttcagggccagagcccctgcaccctgtttgggctggtgagctgggagttcaggtgggctgctcacaccgtccttcagaggccccaccaatttctcggacacttctcagtgtgtggaagctcatgtgggcccctgaggctcatgcctgggaagtgttgtggtgggggctcccaggaggactggcccagagagccctgagatagcggggatcctgaactggactgaataaaacgtggtctcccactg

SEQ ID NO: 5877 - DNA, 7680 bp, Homo sapiens
gaagagcaagaggcaggctcagcaaatggttcagccccagtccccggtggctgtcagtcaaagcaagcccggttgttatgacaatggaaaacactatcagataaatcaacagtgggagcggacctacctaggtaatgtgttggtttgtacttgttatggaggaagccgaggttttaactgcgaaagtaaacctgaagctgaagagacttgctttgacaagtacactgggaacacttaccgagtgggtgacacttatgagcgtcctaaagactccatgatctgggactgtacctgcatcggggctgggcgagggagaataagctgtaccatcgcaaaccgctgccatgaagggggtcagtcctacaagattggtgacacctggaggagaccacatgagactggtggttacatgttagagtgtgtgtgtcttggtaatggaaaaggagaatggacctgcaagcccatagctgagaagtgttttgatcatgctgctgggacttcctatgtggtcggagaaacgtgggagaagccctaccaaggctggatgatggtagattgtacttgcctgggagaaggcagcggacgcatcacttgcacttctagaaatagatgcaacgatcaggacacaaggacatcctatagaattggagacacctggagcaagaaggataatcgaggaaacctgctccagtgcatctgcacaggcaacggccgaggagagtggaagtgtgagaggcacacctctgtgcagaccacatcgagcggatctggccccttcaccgatgttcgtgcagctgtttaccaaccgcagcctcacccccagcctcctccctatggccactgtgtcacagacagtggtgtggtctactctgtggggatgcagtggttgaagacacaaggaaataagcaaatgctttgcacgtgcctgggcaacggagtcagctgccaagagacagctgtaacccagacttacggtggcaacttaaatggagagccatgtgtcttaccattcacctacaatggcaggacgttctactcctgcaccacggaagggcgacaggacggacatctttggtgcagcacaacttcgaattatgagcaggaccagaaatactctttctgcacagaccacactgttttggttcagactcaaggaggaaattccaatggtgccttgtgccacttccccttcctatacaacaaccacaattacactgattgcacttctgagggcagaagagacaacatgaagtggtgtgggaccacacagaactatgatgccgaccagaagtttgggttctgccccatggctgcccacgaggaaatctgcacaaccaatgaaggggtcatgtaccgcattggagatcagtgggataagcagcatgacatgggtcacatgatgaggtgcacgtgtgttgggaatggtcgtggggaatggacatgcattgcctactcgcaacttcgagatcagtgcattgttgatgacatcacttacaatgtgaacgacacattccacaagcgtcatgaagaggggcacatgctgaactgtacatgcttcggtcagggtcggggcaggtggaagtgtgatcccgtcgaccaatgccaggattcagagactgggacgttttatcaaattggagattcatgggagaagtatgtgcatggtgtcagataccagtgctactgctatggccgtggcattggggagtggcattgccaacctttacagacctatccaagctcaagtggtcctgtcgaagtatttatcactgagactccgagtcagcccaactcccaccccatccagtggaatgcaccacagccatctcacatttccaagtacattctcaggtggagacctaaaaattctgtaggccgttggaaggaagctaccataccaggccacttaaactcctacaccatcaaaggcctgaagcctggtgtggtatacgagggccagctcatcagcatccagcagtacggccaccaagaagtgactcgctttgacttcaccaccaccagcaccagcacacctgtgaccagcaacaccgtgacaggagagacgactcccttttctcctcttgtggccacttctgaatctgtgaccgaaatcacagccagtagctttgtggtctcctgggtctcagcttccgacaccgtgtcgggattccgggtggaatatgagctgagtgaggagggagatgagccacagtacctggatcttccaagcacagccacttctgtgaacatccctgacctgcttcctggccgaaaatacattgtaaatgtctatcagatatctgaggatggggagcagagtttgatcctgtctacttcacaaacaacagcgcctgatgcccctcctgacccgactgtggaccaagttgatgacacctcaattgttgttcgctggagcagaccccaggctcccatcacagggtacagaatagtctattcgccatcagtagaaggtagcagcacagaactcaaccttcctgaaactgcaaactccgtcaccctcagtgacttgcaacctggtgttcagtataacatcactatctatgctgtggaagaaaatcaagaaagtacacctgttgtcattcaacaagaaaccactggcaccccacgctcagatacagtgccctctcccagggacctgcagtttgtggaagtgacagacgtgaaggtcaccatcatgtggacaccgcctgagagtgcagtgaccggctaccgtgtggatgtgatccccgtcaacctgcctggcgagcacgggcagaggctgcccatcagcaggaacacctttgcagaagtcaccgggctgtcccctggggtcacctattacttcaaagtctttgcagtgagccatgggagggagagcaagcctctgactgctcaacagacaaccaaactggatgctcccactaacctccagtttgtcaatgaaactgattctactgtcctggtgagatggactccacctcgggcccagataacaggataccgactgaccgtgggccttacccgaagaggccagcccaggcagtacaatgtgggtccctctgtctccaagtaccccctgaggaatctgcagcctgcatctgagtacaccgtatccctcgtggccataaagggcaaccaagagagccccaaagccactggagtctttaccacactgcagcctgggagctctattccaccttacaacaccgaggtgactgagaccaccatcgtgatcacatggacgcctgctccaagaattggttttaagctgggtgtacgaccaagccagggaggagaggcaccacgagaagtgacttcagactcaggaagcatcgttgtgtccggcttgactccaggagtagaatacgtctacaccatccaagtcctgagagatggacaggaaagagatgcgccaattgtaaacaaagtggtgacaccattgtctccaccaacaaacttgcatctggaggcaaaccctgacactggagtgctcacagtctcctgggagaggagcaccaccccagacattactggttatagaattaccacaacccctacaaacggccagcagggaaattctttggaagaagtggtccatgctgatcagagctcctgcacttttgataacctgagtcccggcctggagtacaatgtcagtgtttacactgtcaaggatgacaaggaaagtgtccctatctctgataccatcatcccagctgttcctcctcccactgacctgcgattcaccaacattggtccagacaccatgcgtgtcacctgggctccacccccatccattgatttaaccaacttcctggtgcgttactcacctgtgaaaaatgaggaagatgttgcagagttgtcaatttctccttcagacaatgcagtggtcttaacaaatctcctgcctggtacagaatatgtagtgagtgtctccagtgtctacgaacaacatgagagcacacctcttagaggaagacagaaaacaggtcttgattccccaactggcattgacttttctgatattactgccaactcttttactgtgcactggattgctcctcgagccaccatcactggctacaggatccgccatcatcccgagcacttcagtgggagacctcgagaagatcgggtgccccactctcggaattccatcaccctcaccaacctcactccaggcacagagtatgtggtcagcatcgttgctcttaatggcagagaggaaagtcccttattgattggccaacaatcaacagtttctgatgttccgagggacctggaagttgttgctgcgacccccaccagcctactgatcagctgggatgctcctgctgtcacagtgagatattacaggatcacttacggagaaacaggaggaaatagccctgtccaggagttcactgtgcctgggagcaagtctacagctaccatcagcggccttaaacctggagttgattataccatcactgtgtatgctgtcactggccgtggagacagccccgcaagcagcaagccaatttccattaattaccgaacagaaattgacaaaccatcccagatgcaagtgaccgatgttcaggacaacagcattagtgtcaagtggctgccttcaagttcccctgttactggttacagagtaaccaccactcccaaaaatggaccaggaccaacaaaaactaaaactgcaggtccagatcaaacagaaatgactattgaaggcttgcagcccacagtggagtatgtggttagtgtctatgctcagaatccaagcggagagagtcagcctctggttcagactgcagtaaccaacattgatcgccctaaaggactggcattcactgatgtggatgtcgattccatcaaaattgcttgggaaagcccacaggggcaagtttccaggtacagggtgacctactcgagccctgaggatggaatccatgagctattccctgcacctgatggtgaagaagacactgcagagctgcaaggcctcagaccgggttctgagtacacagtcagtgtggttgccttgcacgatgatatggagagccagcccctgattggaacccagtccacagctattcctgcaccaactgacctgaagttcactcaggtcacacccacaagcctgagcgcccagtggacaccacccaatgttcagctcactggatatcgagtgcgggtgacccccaaggagaagaccggaccaatgaaagaaatcaaccttgctcctgacagctcatccgtggttgtatcaggacttatggtggccaccaaatatgaagtgagtgtctatgctcttaaggacactttgacaagcagaccagctcagggtgttgtcaccactctggagaatgtcagcccaccaagaagggctcgtgtgacagatgctactgagaccaccatcaccattagctggagaaccaagactgagacgatcactggcttccaagttgatgccgttccagccaatggccagactccaatccagagaaccatcaagccagatgtcagaagctacaccatcacaggtttacaaccaggcactgactacaagatctacctgtacaccttgaatgacaatgctcggagctcccctgtggtcatcgacgcctccactgccattgatgcaccatccaacctgcgtttcctggccaccacacccaattccttgctggtatcatggcagccgccacgtgccaggattaccggctacatcatcaagtatgagaagcctgggtctcctcccagagaagtggtccctcggccccgccctggtgtcacagaggctactattactggcctggaaccgggaaccgaatatacaatttatgtcattgccctgaagaataatcagaagagcgagcccctgattggaaggaaaaagacagacgagcttccccaactggtaacccttccacaccccaatcttcatggaccagagatcttggatgttccttccacagttcaaaagacccctttcgtcacccaccctgggtatgacactggaaatggtattcagcttcctggcacttctggtcagcaacccagtgttgggcaacaaatgatctttgaggaacatggttttaggcggaccacaccgcccacaacggccacccccataaggcataggccaagaccatacccgccgaatgtaggacaagaagctctctctcagacaaccatctcatgggccccattccaggacacttctgagtacatcatttcatgtcatcctgttggcactgatgaagaacccttacagttcagggttcctggaacttctaccagtgccactctgacaggcctcaccagaggtgccacctacaacatcatagtggaggcactgaaagaccagcagaggcataaggttcgggaagaggttgttaccgtgggcaactctgtcaacgaaggcttgaaccaacctacggatgactcgtgctttgacccctacacagtttcccattatgccgttggagatgagtgggaacgaatgtctgaatcaggctttaaactgttgtgccagtgcttaggctttggaagtggtcatttcagatgtgattcatctagatggtgccatgacaatggtgtgaactacaagattggagagaagtgggaccgtcagggagaaaatggccagatgatgagctgcacatgtcttgggaacggaaaaggagaattcaagtgtgaccctcatgaggcaacgtgttacgatgatgggaagacataccacgtaggagaacagtggcagaaggaatatctcggtgccatttgctcctgcacatgctttggaggccagcggggctggcgctgtgacaactgccgcagacctgggggtgaacccagtcccgaaggcactactggccagtcctacaaccagtattctcagagataccatcagagaacaaacactaatgttaattgcccaattgagtgcttcatgcctttagatgtacaggctgacagagaagattcccgagagtaaatcatctttccaatccagaggaacaagcatgtctctctgccaagatccatctaaactggagtgatgttagcagacccagcttagagttcttctttctttcttaagccctttgctctggaggaagttctccagcttcagctcaactcacagcttctccaagcatcaccctgggagtttcctgagggttttctcataaatgagggctgcacattgcctgttctgcttcgaagtattcaataccgctcagtattttaaatgaagtgattctaagatttggtttgggatcaataggaaagcatatgcagccaaccaagatgcaaatgttttgaaatgatatgaccaaaattttaagtaggaaagtcacccaaacacttctgctttcacttaagtgtctggcccgcaatactgtaggaacaagcatgatcttgttactgtgatattttaaatatccacagtactcactttttccaaatgatcctagtaattgcctagaaatatctttctcttacctgttatttatcaatttttcccagtatttttatacggaaaaaattgtattgaaaacacttagtatgcagttgataagaggaatttggtataattatggtgggtgattattttttatactgtatgtgccaaagctttactactgtggaaagacaactgttttaataaaagatttacattccaca

SEQ ID NO: 5878 - DNA, 2286 bp, Homo sapiens
cctgtgagcaccacgtcaacggctcccggcccccatgcacgggggagggagatacccccaagtgtagcaagatctgtgagcctggctacagcccgacctacaaacaggacaagcactacggatacaattcctacagcgtctccaatagcgagaaggacatcatggccgagatctacaaaaacggccccgtggagggagctttctctgtgtattcggacttcctgctctacaagtcaggagtgtaccaacacgtcaccggagagatgatgggtggccatgccatccgcatcctgggctggggagtggagaatggcacaccctactggctggttgccaactcctggaacactgactggggtgacaatggcttctttaaaatactcagaggacaggatcactgtggaatcgaatcagaagtggtggctggaattccacgcaccgatcagtactgggaaaagatctaatctgccgtgggcctgtcgtgccagtcctgggggcgagatcggggtagaaatgcattttattctttaagttcacgtaagatacaagtttcagacagggtctgaaggactggattggccaaacatcagacctgtcttccaaggagaccaagtcctggctacatcccagcctgtggttacagtgcagacaggccatgtgagccaccgctgccagcacagagcgtccttccccctgtagactagtgccgtaggagtacctgctgccccagctgactgtggccccctccgtgatccatccatctccagggagcaagacagagacgcaggaatggaaagcggagttcctaacaggatgaaagttcccccatcagttcccccagtacctccaagcaagtagctttccacatttgtcacagaaatcagaggagagacggtgttggagccctttggagaacgccagtctcccaggccccctgcatctatcgagtttgcaatgtcacaacctctctgatcttgtgctcagcatgattctttaatagaagttttattttttcgtgcactctgctaatcatgtgggtgagccagtggaacagcgggagacctgtgctagttttacagattgcctccttatgacgcggctcaaaaggaaaccaagtggtcaggagttgtttctgacccactgatctctactaccacaaggaaaatagtttaggagaaaccagcttttactgtttttgaaaaattacagcttcaccctgtcaagttaacaaggaatgcctgtgccaataaaaggtttcggaattccgtcccctttcaagttttagggaaatttaactgaagtgtatacaaattagacattgctaatatgtacaaaagtattttatacggtttttgaacgatctagctatttgcaataaacaggatgttacaaaaacagtccaataatgcatttcctattaagaagcacaatacacaacataattcaattttattaaaaaataacttcaaaatgtagaacaatcccctttaggaagaaaagctatttctgtagttcactctgtcagtaaacacacaagttgaacgctgcagcagagggctgtccttttccatggagaaaagaaatgaggcttctagggcctatcttttctgggtaaaaattccacctacagctgagatgggcagttattgcctgtggtaggcagaatttgaaaatgccccttccccctttcaatgagctaatctccagaacccgtgaatatgatgagatgagacagtactcctgcaattatgttctatcgcacaatcaaccttaaaatatatctgtgggcttgagctaatcatatgcccctaaaacaggaggacgggagagagatatgaagcatgagaaagagcaggaaggctggtttgaagctggaggggaccacataagaaggaatgcaggcagccttgaggtgagagaggggcctccagctgagagccagcaaagaactgaattccgccaacaacctgaatgaacttagaagcagattcttccccagagcctccatgaaggaatgttgtcctgccaacccttatttcagcctttaagaccctgagcagagaatccagccacactgtgccagactcatgagctacagaactgctatgggtattgttttttaaactgctaaatttggggtaatttgtcacacagcaatagaaaactaatacactgcccaagggtaacttttcttaacctaattacatttggcagtttctgcttgggttctgaatgcatttttttacacaaagctctgctggaaaaactgaataacgcgctggcagc

SEQ ID NO: 5879 - DNA, 1799 bp, Homo sapiens; identical to SEQ ID NO: 3808

SEQ ID NO: 5880 - DNA, 2259 bp, Homo sapiens; identical to SEQ ID NO: 431

SEQ ID NO: 5881 - DNA, 4139 bp, Homo sapiens; identical to SEQ ID NO: 5408

SEQ ID NO: 5882 - DNA, 1261 bp, Homo sapiens
  misc_feature (1)..(1261): n=a,t,g or c
tgggaagaggatgatcctaaacaaagctctgatgctgggggcccttgccctgaccaccgtgatgagcccctgtggaggtgaagacattgtggctgaccacgtcgcctcttatggtgtaaacttgtaccagtcttacggtccctctggccagtacacccatgaatttgatggagatgagcagttctacgtggacctggggaggaaggagactgtctggtgtttgcctgttctcagacaatttagatttgacccgcaatttgcactgacaaacatcgctgtcctaaaacataacttgaacagtctgattaaacgctccaactctaccgctgctaccaatgaggttcctgaggtcacagtgttttccaagtctcccgtgacactgggtcagcccaacatcctcatctgtcttgtggacaacatctttcctcctgtggtcaacatcacatggctgagcaatgggcactcagtcacagaaggtgtttctgagaccagcttcctctccaagagtgatcattccttcttcaagatcagttacctcaccctcctcccttctgctgaggagagttatgactgcaaggtggagcactggggcctggacaagcctcttctgaaacactgggagcctgagattccagcccctatgtcagagctcacagagactgtggtctgcgccctgggattgtctgtgggcctcgtgggcattgtggtgggcactgtcttcatcatccgaggcctgcgttcagttggtgcttccagacaccaagggcccttgtgaatcccatcctggaatggaaggtgcatcgccatctacaggagcagaagagtggacttgctacatgacctagcattattttctggccccatttatcatatcccttttctcctccaaatgtttctcctctcacctcttctgtgggacttaaattgctatatctgctcagagctcacaaatgcctttgaattatttccctgacttcctgatttttttcttcttaagtgttacctactaagagttgcctggagtaagccacccagctacctaattcctcagtaacctccatctataatctccatggaagcaacaaattccctttatgagatatatgtcaaatttttccatctttcatcnagggctgactgaaaccgtggctaagaattgggagactctcttgtttcaagccaatttaacatcatttaccagatcatttgtcatgtccagtaacacagaagcaaccaactacagtatagcctgataacatga

SEQ ID NO: 5883 - DNA, 756 bp, Homo sapiens
ctggagacacagatcgaggctctcaaggaggagctgctcttcatgaagaagaaccacgaagaggaagtaaaaggcctacaagcccagattgccagctctgggttgaccgtggaggtagatgccccgaaatctcaggacctctccaagatcatggcagacatccgggcccaatatgacgagctggctcggaagaaccgagaggagctagacaagtactggtctcagcagattgaggagagcaccacagtggtcaccacacagtctgctgaggttggagctgctgagacgacgctcacagagctgagacgtacagtccagtccttggagatccgactggaccgcatgagaaatctgaaggccagcttggagaacagcctgagggaggtggaggcccgttacgccctacagatggagcagctcaacgggatcctgctgcaccttgagtcagagctggcacagacccgggcagagggacagcgccaggcccaggagtatgaggccctgctgaacatcaaggtcaagctggaggctgagatcgccacctaccgccgcctgctggaagatggcgaggactttaatcttggtgatgccttggacagcagcaactccatgcaaaccatccaaaagaccaccacccgccggatagtggatggcaaagtggtgtctgagaccaatgacaccaaagttctgaggcattaagccagcagaagacgggtacctttggggagcaggaggccaataaaaagttcagagttc

SEQ ID NO: 5884 - DNA, 534 bp, Homo sapiens; identical to SEQ ID NO: 486

SEQ ID NO: 5885 - DNA, 594 bp, Homo sapiens; identical to SEQ ID NO: 5016

SEQ ID NO: 5886 - DNA, 527 bp, Homo sapiens; identical to SEQ ID NO: 4215

SEQ ID NO: 5887 - DNA, 466 bp, Homo sapiens; identical to SEQ ID NO: 3325

SEQ ID NO: 5888 - DNA, 419 bp, Homo sapiens
ccattatatccaggtatgctacaagttcttttaactcttatcagaagttattattactgtttccttagagaggctaccaggctaaaattcacttagtttggtttgtctaatgtcctcattattttatcctgaagatgatgtcatttctcaggacttgaaaatgacttggctgaactaaaggtaaaaaagccaagcctctgtcacttttcctagactcctaggcacagctatggagtctttgcacagtgcccataccctaaaaattaataatgaaaaccaaacctcaagaacctagagcagctctctacttgccaccatggactccagtggtcagcataagaaaagcagatagttgcattctatttagtttatagctgctttgttcctttgtgtttcactaagcagaggctcaaaaattc

SEQ ID NO: 5889 - DNA, 551 bp, Homo sapiens; identical to SEQ ID NO: 907
  misc_feature (1)..(551): n=a,t,g or c

SEQ ID NO: 5890 - DNA, 1542 bp, Homo sapiens
cgaccggcacgttcaccccatccctcaggctttatttattttttttcgacaggttcttttcaaggctccagtcaccgcagcagttgtccatgctgtagtttccactttcctgtatgggcgggctggttaggattccactttcccccaagtgcttagcccagggccagacaaaaagtagttgcttaagaaatacttgttgaaggaataaattaatgaatgaatttgtgcttacagcggctggatggcagacaaacctatgattataggaacatcaggatctcatttggaacagattacggatgctgcattgtggaacttggaaaaacaagagttcttggacaggtttcctgtgaacttgtgtctccaaaactcaatcgggcaacagaaggtattctttttttaaccttgaactctctcagatggccgctccagctttcgaacctggcaggcagtcagatctcttggtgaagttgaatcgactcatggaaagatgtctaagaaattcgaagtgtatagacactgagtctctctgtgttgttgctggtgaaaaggtttggcaaatacgtgtagacctacatttattaaatcatgatggaaatattattgatgctgccagcattgctgcaatcgtggccttatgtcatttccgaagacctgatgtctctgtccaaggagatgaagtaacactgtatacacctgaagagcgtgatcctgtaccattaagtatccaccacatgcccatttgtgtcagttttgcctttttccagcaaggaacatatttattggtggatcccaatgaacgagaagaacgtgtgatggatggcttgctggtgattgccatgaacaaacatcgagagatttgtactatccagtccagtggtgggataatgctactaaaagatcaagttctgagatgcagtaaaatcgctggtgtgaaagtagcagaaattacagagctaatattgaaagctttggagaatgaccaaaaagtaaggaaagaaggtggaaagtttggttttgcagagtctatagcaaatcaaaggatcacagcatttaaaatggaaaaggcccctattgatacctcggatgtagaagaaaaagcagaagaaatcattgctgaagcagaacctccttcagaagttgtttctacacctgtgctatggactcctggaactgcccaaattggagagggagtagaaaactcctggggtgatcttgaagactctgagaaggaagatgatgaaggcggtggtgatcaagctatcattcttgatggtataaaaatggacactggagtagaagtctctgatattggaagccaagatgctcccataatactctcagatagtgaagaagaagaaatgatcattttggaaccagacaagaatccaaagaaaataagaacacagaccaccagtgcaaaacaagaaaaagcaccaagtaaaaagccagtgaaaagaagaaaaaagaagagagctgccaattaaagctaacagttgtatatctgtatatataactattaaaagggatatttattccatt

SEQ ID NO: 5891 - DNA, 199 bp, Homo sapiens
ttttctggcactcactataatcagccttgcactagagctgtttgtggacttggcttcaccccctcctcctcagccctcccccacccattaaattgtgagctcttagaagacaggggtggcctttcatgtctgatcccctaccaaatctagcacagtgccttgcatcaagtagatttcaataaatatatgttaaatggca

SEQ ID NO: 5892 - DNA, 1803 bp, Homo sapiens
gataagcttgatatcgacttcgtgttcctgggtttccttggcgctgcggccgccgctccctctgcaactgtatgaggaggaggaggaggaggatgtgaagatggcggagctgcagatgctgctggaagaggaaatcccgggggggcgccgggccctcttcgacagatacacaaatctggaacgggtggccgattactgcgagaacaactacatacagtcagcagataagcagagagccctagaagaaaccaaagcctacaccacccaatccttagcaagtgttgcctatctgataaacaccttggacaacaatgtcctgcagatgctggatatccaggcatcccagctacgaaggatggaatcttcaatcaatcatatttcacaaacagttgatattcataaagagaaagttgcaagaagagaaattggtattttgactaccaataaaaacacttcaaggacacataagattattgctccagccaaccttgaacgaccagttcgttatattagaaaacctattgactatacaattctagatgatattggacatggagtaaaggtgagtacccagaacatgaagatgggtgggctgccgcgtacaacacctccaactcagaagccccctagtccccctatgtcagggaaagggacacttgggcggcactccccctatcgcacactggagccagtgcgtcctccagtggtaccaaatgattacgtacctagcccaacccgtaatatggctccctcgcagcagagccctgtgaggacagcttctgtgaatcaaagaaatcgaacttacagcagcagtgggagtagtggagggagccacccaagtagtcggagcagcagtcgagagaacagtggaagtggtagtgtgggggttcctattgctgttcctactccatctcctcccagtgtctttccaggtcatcctgtacagttctacagcatgaataggcctgcctctcgccatactcccccaacaatagggggctcgttgccctatagacgccctccttccattacttcacaaacaagccttcagaatcagatgaatggaggacctttttatagccagaatccagtatctcttgctcctcctcctccctccatcctacaggtaactcctacgttacctttaatgggatttgtggccagagtccaagaaaatatttcagatacaccacctccaccgccacctgtggaagaaccagtctttgatgagtctcccccacctcctcctcctccagaagattacgaagaggaggaagctgctgtggttgagtatagtgatccttatgctgaagaggacccaccgtgggctccacgttcttacttggaaaaggttgtggcaatttatgactatacaaaagacaaggaagatgagctgtcctttcaggaaggagccattatttatgtcatcaagaagaatgacgatggttggtatgagggagttatgaatggagtgactgggctttttcctgggaattacgttgagtctatcatgcattattctgagtaaagctcagcagggctgtgcttggctcacaggaatagtcaggtcttcccagattatctgaaggccctggggattccactccagtaaagtagaatgaaggatacaaatgataaaaattacactttttttttgggttattccccagtattaaaaacaaagcaagctgagtctgaacaaatggatctttctgccatcatttgtacaatgctgagctgtctggattgaaataaaatgaccatttttatgtatgtcaaaggtaaaaaaaaaaaaaaaaaaaa

SEQ ID NO: 5893 - DNA, 465 bp, Homo sapiens
ttttttttttgaaattcattaaatacactttatttaaatagcatttatctcagttggctctatgccagttggtcttggtattggggtaagggggtattgcaggtaaaaagaggtgaagcagattctggctttcagtttcttagctcagaaattccagcaatccctgtagttctttgcatcccctcaccacctctggaatagagagcagggtcttataaatatgctgaacaatgtcatctagtttttctaactccttgtcagagccgccgaagttctcctctaggatatttctatggctctggaacttgatcatgagtttttccttctcatttttcatctccaggaacatcactctcagttttggtccacctcctgagaagagccacactttctcctggatccaattgggtgggccataggctgggcagtttggagtccagctgggcctgccagggcctcctggag

SEQ ID NO: 5894 - DNA, 652 bp, Homo sapiens; identical to SEQ ID NO: 3036
  misc_feature (1)..(652): n=a,t,g or c

SEQ ID NO: 5895 - DNA, 352 bp, Homo sapiens; identical to SEQ ID NO: 4300

SEQ ID NO: 5896 - DNA, 362 bp, Homo sapiens; identical to SEQ ID NO: 1114

SEQ ID NO: 5897 - DNA, 313 bp, Homo sapiens
tacaaagatttattacagcacgggaggggttcaggcctggagtcagggaagaaggggaaaggggcagagcagctgggggacaaggaaaacctggcgccccccgctgtgtgccccaccggggacataaactaggcggcattcctggcatcaaagcacaaaacgcaacaaagaggtctctgccagtccatcttccaggcacccaggaggagcaagggtgattaagggaagattcccaaaatgttgaggctatggagaaaaacgccttagtcctggaccctggtagaagccggtgagagaagtggtgacttggaat

SEQ ID NO: 5898 - DNA, 386 bp, Homo sapiens
ttttttttgagttggaaacaactttattgatacctgagaaaaagtgcaggaaaaatattcctcctgaccaggtggcctgtcccctgaggccagatcattctctcgcctctcccttaagccctgggtcatttgggacctcactggccagcacccagaggctgaagacatccacagccagagcctggaagccagacccagagaccaggagagggaatgtctacagcgtggctcctgaggtcagggccaaggtcagcgtgggaccctcatcggtcaagggccagcgcctcttggatcactgtccggagtccgatggaaaacagctcctcccatggttcccggatccaggcaagcagggctgtcagctgctcctgacacaccacacggag

SEQ ID NO: 5899 - DNA, 545 bp, Homo sapiens; identical to SEQ ID NO: 1327

SEQ ID NO: 5900 - DNA, 160 bp, Homo sapiens
gtaaagtttagacctgtattccaattttctacaaactaaaaaggtaactgctggtaatctagatttaacagtattttattccaaagtaaacatctgaatagctcagagaactctttattatcttactacaagtaaaatatcattctaatggaaaacattc

SEQ ID NO: 5901 - DNA, 425 bp, Homo sapiens
ttcagatgcaaaaataatgtattgtaaatgtttttaaatcattctccattaaaatttttcattattttctacaaaatacaaatacactaaggttcacatttaacatgcaaaaaataaagaggaagaagagaaatccactagtttcactagtttaaggaacaatcactaaaatgagacaatgatctatagtacatgtatcttctagttaaataggaaagcaaattcacattatccagagtcctgggtcataaagaactcaagtcaaatctagtctgaggcagacactctggctcgtgcccgcacacagctgcccttcacactgactttaacccagggctcatttaactgagaggcgagatctctcacaatacagcacaaaactctttctcctggtaaatttcttttcccaacaaaacaatcagttc

SEQ ID NO: 5902 - DNA, 373 bp, Homo sapiens; identical to SEQ ID NO: 3204

SEQ ID NO: 5903 - DNA, 380 bp, Homo sapiens; identical to SEQ ID NO: 2849

SEQ ID NO: 5904 - DNA, 220 bp, Homo sapiens
cagaaacaaaaavgytttatttataaataaactgsttttaaagcttgyatctaaattsgkgtaytttcaacatctatttagtgatcatgaagttccagaaccagaatcagaaatgaagatgagactaccaagacgagccaaaaccgcagcactagaaaaacstaaacttaaccttgcccactttctcaatgaagctctamsctaggaaagacgatggaga

SEQ ID NO: 5905 - DNA, 305 bp, Homo sapiens
  misc_feature (1)..(305): n=a,t,g or c
gaactttgggaaaattatttatttctccccacggggttcagacaagtaatttcacatttcattgtaagtcaagggtaagaaaacattttttgtacatccatcactaatagagatcacagtatgtcaatgaaatatttaaatacactgtacagagattgctttttaatggatttctataagtagtattaataggaaaaagcatataatacaatctactctgtatctaagagctttaatttattcaaatattggaagaaattcatctnctgaattttncttatttaaaaagcattatgagaactgat

SEQ ID NO: 5906 - DNA, 267 bp, Homo sapiens
  misc_feature (1)..(267): n=a,t,g or c
aattccaataaagcagtttattttctgagagcccgtgccctgtcccatcccgccccacgagcccatccaggagccacacaccctgcctggnctgtgagcactattctcctggtgacacggcgctcagccgagggacctgggacaagagctgctctgtcctgcttggtggctctcagaggagagccttgagggctctgagcagcaggtacaccgtcctcccctcctgccagcctggttctgccctcactggaagagtcaaccccgcca

SEQ ID NO: 5907 - DNA, 430 bp, Homo sapiens
  misc_feature (1)..(430): n=a,t,g or c
tcaggaggatatgtcctaaaagtttaattcaaagtttccagttcccaatttatatacaaagttcacatggttgattaacgtcttatggcagatcagaagatttaatgatcaaaacattctcatttttgtcaatcaattatgattaggaagccaagtcataattagaagtttgtttgctgagcactgaatcagaagtagnaantggattaaatgcctaatgggtatgaaggcaagtaggcctaatgtacccattgtgtgtcaagacatttagtcatttaataaataaatatgactactgtgtactagggcacaaaganntaaaggcaaaagagattcagtaaggcactttcaacagcctgacatctnttggggagacagacaaatgatttaatatgcatgatgttctatgatacgngtccaggctgctttg

SEQ ID NO: 5908 - DNA, 456 bp, Homo sapiens
  misc_feature (1)..(456): n=a,t,g or c
cagaaaataacagctttattgctacagatgtgagagcatttacaaaatgccaaggaaaaccattccgttttgagtctctggagcctgaactctcaccatgtaccagaaaagaatgcccctctttcgaactttcaaacagttgggattatttttgtttcttatcatcccaattatttgctcaagtttgcctccattgggccccgttcagagtttcttgggctgcttgtactagtcacagctccacttccatctcttctcaggaagaggtgggcacaagacacatctgagccccttagtattgtgatgggtgggccgggaaatgatcaaaggggtaggcatttagggaaatcagcaaactaaaggcctccaaattcaaagggtgggacaaatggcatttntcaacttcaaacaggttggggtaatgcttttcatnagggtancattatggtttttngt

SEQ ID NO: 5909 - DNA, 279 bp, Homo sapiens; identical to SEQ ID NO: 3894

SEQ ID NO: 5910 - DNA, 378 bp, Homo sapiens; identical to SEQ ID NO: 4391

SEQ ID NO: 5911 - DNA, 409 bp, Homo sapiens
  misc_feature (1)..(409): n=a,t,g or c
gtcggggaaaaagggtgtttattaaccaacggcagggggaggagctgagcccaggctccccactctgtcacatgcctgttccacccacctggttgtaagtgggggcattcctaaagaagtgtagccattctcacaataaatacattcattgtnggggtggaggtgggagaggttgggtgaagggcagtaaaaacccgtgggattccacgttctcagctacaaaaataacagtcatcctcacccgaggggaatgggggagctcagtcagaattgattgtcccatataggcctagagacttcagaggcccctggcccttgaaagtgccccggtnaagtaggacaggggtaggagctaagcgtccaaactcccagcctctggccctttgcatagttcccagaatgggcttca

SEQ ID NO: 5912 - DNA, 202 bp, Homo sapiens; identical to SEQ ID NO: 1758

SEQ ID NO: 5913 - DNA, 368 bp, Homo sapiens
  misc_feature (1)..(368): n=a,t,g or c
aagaaaacaataataatgggggaagaaaattcctgattcaggggggtggggaaaactacatgaatactcaaaatgcaatctgacttactgaatcacagaaaacacagctttgcttanttgtgtttggagaaagacggatttgggatgttactaagaaattactatactctacatactcttgtaaaacaataagatagctaatgttttatgagtgattataagactagtttctaaatgggcttccaatataaaacctaataaaaatttattatgacaaacatttgtgcagctgatttacactgggtttgtgccntgactgcagttaaaaaaataaacatctgggaggttaaatttgatacggggntcct

SEQ ID NO: 5914 - DNA, 341 bp, Homo sapiens; identical to SEQ ID NO: 1763
  misc_feature (1)..(341): n=a,t,g or c

SEQ ID NO: 5915 - DNA, 237 bp, Homo sapiens; identical to SEQ ID NO: 3616
  misc_feature (1)..(237): n=a,t,g or c

SEQ ID NO: 5916 - DNA, 257 bp, Homo sapiens
ttttttttccttaaagaaagcactttattttccatttaaacaacttggtcacaggacgttattttacataaatggaagtaatttgtaaaatttccatgtaaaaggccttgtgtctgagtctgaggtgataagaggatatgaatacaagtatataaaaacagtgcaaaatgtgcagcccacagcctccggagttgggcttcagaaatcccccttaatgttgctaggaccagttacattaaatattaaatgtaacacca

SEQ ID NO: 5917 - DNA, 396 bp, Homo sapiens
  misc_feature (1)..(396): n=a,t,g or c
tttttttttttttacccggagatnaatggatttattgctttataaaaaagaagtctaataaaactgaagagaaaataactaaaaatccaaacacaactcacccctctaagcacgcccaggaggtctcaagacacacttctgggggcagtcaaggtgggcgggttggtgggccaggcggacgggcctcccccgtcatcagctccagggccccacggagccgccggcaggggntgctgtgggcctgtgctttgggacaagntcctggccccacgccagatggctncctggggcactggccaactgcaggcctggcggctcccctgggtcagttgggataagggctaactcctagagcccaccccgaccccacacanccctnggacccacccacgttcc

SEQ ID NO: 5918 - DNA, 323 bp, Homo sapiens
  misc_feature (1)..(323): n=a,t,g or c
ataacaatttatatatatttatttatgtattttatatatttataaattttatttataacaaattatttattaccaaaaatgaataactttataaaaatgtaattataaattaaaataagtatgtcgattttatttcttacagtcctgaagactggaaagtacaaagtcaaggcgctcacatctggcgagggccttcttgctgtgtcatctcatgttggaagggtaggagaacacatgcacatgtgcaaaataagccaaattcatttttataacaaaactatttcttccaataatggaanttaattcatttatttggggcagag

SEQ ID NO: 5919 - DNA, 299 bp, Homo sapiens; identical to SEQ ID NO: 3098
  misc_feature (1)..(299): n=a,t,g or c

SEQ ID NO: 5920 - DNA, 436 bp, Homo sapiens; identical to SEQ ID NO: 2220
  misc_feature (1)..(436): n=a,t,g or c

SEQ ID NO: 5921 - DNA, 346 bp, Homo sapiens
gggagaagcattttaacactgacattgtttggaattgccagtgcatggtaataataaaaagcagtcagttaagaccagcctgggcaacatagcaagaccctattttaaaaaaaataccctacgaaatccaacaaaaagcattcagaattttagttggcttcattcttcctcttattgtctgctcccaggggtgaactgctcctactaccctcagctatgggaatgccactatttggggactaaaagaaaaggggtcaaagttcaaaatttgtggatttgctgcagtcatttatcccatggcactttttttactcccctctacaagttcttcaagggggcacttgct

SEQ ID NO: 5922 - DNA, 413 bp, Homo sapiens
  misc_feature (1)..(413): n=a,t,g or c
tgtttcataccttttattacaaaaatcaataacttaattcagttctgtataaagtcgataggacttctggtccaataagcagcctaagctttcattctcatcccaagaagggacaggagtcttggcccagaggctgtggggaccaccaaaagcctcccaggcagctggaacactgtgtccaaaccaaggaagtccaatgtggggtgtggctgagtgaagagctgttcctaaggagccaagtgctgtctatacaggcttgcccctccaggagcattgggtcacctctggggatggccaggctgaatcagcactgccagcctctgcccacctgatctntgccctggggcttggaacaaggtcacctgaggcaaaaagcattgtcccccaaagaagggncagcgattttaacatct

SEQ ID NO: 5923 - DNA, 359 bp, Homo sapiens; identical to SEQ ID NO: 4437

SEQ ID NO: 5924 - DNA, 522 bp, Homo sapiens
cgtatatacatatatataatattttattttaaaatgtcattgaacatatacatttctttagctttttccaggggacattgcacctaagtttcaaaacacacaaaatagatcccctttactaaacagttttcattttggggttacaaaaaagtcaatgtttcacaatcacaaagcataaaggtacatggttctgaaacaatttccaggcagatttctctcattcactgtactagggtagttttggaaacccagaccatgatccattccttacaaatgatctccaccatgggcctccctgggtctccagaaaaaaaacaaagaaaactgggggcaaaacaggagtaaaataataacctcaggactcaggaaacaaacacaaaatacttgtgggagatcagaaaagtagagggacacaggttctccttcaagtacatcacagtagaaaactacagcacatttacagccttatttgggtcactgtctacctgggttggctacatggagcaaaactttcacctaagg

SEQ ID NO: 5925 - DNA, 174 bp, Homo sapiens
gtattatatttttattgttggcttaaaaaaattacttctttaacctccttaatttgtcagtttgtgggaggtgaatctcaatggcatcaaaagttatagtcttcttacacttgttaaaaataaagtgtttaaacaagtttgtttccattcacaaacttactcccaactacaaaa

SEQ ID NO: 5926 - DNA, 273 bp, Homo sapiens
  misc_feature (1)..(273): n=a,t,g or c
gtatgttgtttcatttaattcttaaataatcctttacagactcagagaggtgaagagagtagcacaggtagtatcagaattgggattcaaacctgacacatacactgagcactaagttaaaaccgggcactgggcagctgctgaggatgcgatggtgagtacancagactgcttgctctttttgatatctagaatcttacagctctgcttgctcatccttgtctgttgtcatttactagttgacatcttcgttgactacctagaagcagctgc

SEQ ID NO: 5927 - DNA, 263 bp, Homo sapiens
  misc_feature (1)..(263): n=a,t,g or c
gcttcacaaatgtcaattttattgacactagtgcacaactaaatacaataattgcaaaggaagtggaacgggtcaaacagaaatggtgacaatgagttaganctgcagttgtttcaaggtactacactattatttaaaaaaaaantcacaaaaagaaaantgttatcactacaagtaggatttagangagagaaattctggcagtctgtctagnggttaaancatttcatgcatttgtgagttgctgttggngagttgttttt

SEQ ID NO: 5928 - DNA, 336 bp, Homo sapiens
acactgtctgggtaagaatcaagctcatcttgttgaagaacatctatttgtgattctttttgcatatctgatggtggaatgtagttcttggcaaagtagtctccacgaaacgtccgtcttctcctatagcagaatattccagccaaaacacttacaagtactatgaagagagccccacccactacactagcaatgatcgtggcaattgtgtcatccttaattgttgccaaagttgacaatgggaagggcaattttttaggttctgttgctagatcctcgatgtcagcagttgagggatgccactgaattgtaggctgaagggtggtagtagtagga

SEQ ID NO: 5929 - DNA, 207 bp, Homo sapiens
catttcccacaatcttttattaagaaaaattccaaacatacagaaaagttgaaagaacaagtacactgttcactgaaataccagccactgcagattcaacaatgaacattttggccttatttgctttgtgtattttggggggaactatttggaattaaattacacatttcttgaaggcattcacctatataatccagcatctatctc

SEQ ID NO: 5930 - DNA, 405 bp, Homo sapiens
aaacaacttctgtcactatttatttaaaatgttaaattgtacatttttcataatttctttaagagaatcttctttggtgagtttaaagtgagagtagacaaataacttagtggctaaatgatttaatgtcagatgacttaatgaccagtttttgcccttgatccagccccactctgatattctacctcctgtgtgcttgtcttcattgtccccatattaaaatggtgactgatacggaattctggaaaaatctgatcgattaattaatgtgaatatgcatgttttccttagattctaatatggtctttcttgtgtaagaatgtggatttctaataagccatataactcaatgtttctcagtttgagccctattggcatttggggctggataattccttgtttggg

SEQ ID NO: 5931 - DNA, 405 bp, Homo sapiens; identical to SEQ ID NO: 2576

SEQ ID NO: 5932 - DNA, 464 bp, Homo sapiens
  misc_feature (1)..(464): n=a,t,g or c
tttttttttttcctgagtaattttttattttgtgcagagacaggatccagaactcctgggctcaagtgatcctcccactttggtctcccaatgtgctagaattacagccctgagccacggccccatgccccgtttttaccagtgtatattttctactggaaaatgagacttttagggatgaatgtggacttgtctgttgaaacttgtaaatttgcttaaaaaaaaaaagatctccaagtcttcacaaaattttatattccccaaggctgccccatcacaatgcctgtgaagcttgactggcagacactgaggcctgaagctgggggctgcagggggtcactggctcacccggtccccccgtaatctgtaaaacatactgggtgagggaggctgctggaggacctgaatctctcccttctccaggcagtagtgaggcatatgctgntggccttgggccaattaaa

SEQ ID NO: 5933 - DNA, 424 bp, Homo sapiens; identical to SEQ ID NO: 558

SEQ ID NO: 5934 - DNA, 464 bp, Homo sapiens
  misc_feature (1)..(464): n=a,t,g or c
tttttttttttttttatcatgaaatagtattgcatttattttaaactgatggtccccaacttacttaaaaatcgtagaggcttaacggtttttcagctttacaacagtgcacaagtgatatgcattcagtagaaattatactttgagtacccatacaatcattgtttttcactttcacaacagtattcagtaaataacatgagctattcaacacttcattataaaataggctttgtgttaaatggttttgcccaactgcaggctaaatgttctgagaacatttaaggtaggcttggctaagttatgatttcaggtaagagatattaaatgcattttcaatatgatattttcaaattataatgggtttactgggacctacccacatcataagttgaggagcgtcngtatttaatatggggaaattatttttaattttcccgaacaancggaaaagggtccccatt

SEQ ID NO: 5935 - DNA, 466 bp, Homo sapiens
  misc_feature (1)..(466): n=a,t,g or c
ttccaaaataaaatccgcatttaataaaacagcattgattataaaataaatgtaaagaactccaacaggccgggcgcagtggctcacacctgtaatcctagcactttgggaagccaaggcaggaggatcacttgagctaaggagttcgagaccagcctgggcaatatagtattatttatatatactattatatattatatctaatatatataactgttaaaatatatattttaaaaatataactccaacaagtcctgatttttctcatgctttgtgtttagtatcagattccttcaaaaaggaatgccctttctcattcagccctggcactgaagacacgattcatacccacctgttaaggggcaaaggaaccaagctgcagagagtccacagggntactcatggtcattttcaatgactgacacttggtccactgtgttaaagtacaggattcacacaagaccan

SEQ ID NO: 5936 - DNA, 273 bp, Homo sapiens
tttttactgaaatgtgtttattctatagcaagataaaagcatttttgttttagttaagcaaaatacaaacaacttaattgctgctatcataactcataaaaaagtataaaacagcataaaaacacaataagcaacgtagcaatgaatggtttatgtcaccagtgtttacgttaaagcctcatttaggaaaactttacagcacatgatatgaaaacttacaactttgaaagaaaatatttacattgattattcagatgtggtgtgccttttaaa

SEQ ID NO: 5937 - DNA, 476 bp, Homo sapiens; identical to SEQ ID NO: 358

SEQ ID NO: 5938 - DNA, 383 bp, Homo sapiens
attatgaaggtactttgcagttgtgtttttattgtagagacttaatttatttaaagaaagagttgtctgtagttctgtcctgtcctggagacatgaggggctgtctggtgtgaaggaaagtaggagggacagaaaacaccgtatcgattcagttccatcatccgctgcagtgacttcggaaaacagaatccagcatcccggtcctcccagcctcaggatgaactggtgaggagttgttctttgtgctgtggccagcgtgaccagggtgggctcctggcaatggccacgagaggtcaggagggggagctggcttagtggaaggtgttggggttcggtcggatcatcatcaccactttcttgagtgagtaagagcctcctcggaa

SEQ ID NO: 5939 - DNA, 363 bp, Homo sapiens
ctgcctctcctttttatttatttttctttattattatttttgtttttagagtttctagctaaaaacagagctgaagtcattgtaaaaaagacacattataattttccatatgctacttctctagatttttcaaaaaatcccctttcatcacaaaaatccttctgcagaccataaacacataaagatcttttagacattcattccactactgttccttcttagaagcattatattttcgatcacattttaaaacatcactaacattgcaacaacagatatcaaaaggtaataaaacatactgtaaaaaaattacgtgttttgtttgaaatatggcatttattttacaatgcacatattaggtcg

SEQ ID NO: 5940 - DNA, 233 bp, Homo sapiens; identical to SEQ ID NO: 4058
  misc_feature (1)..(233): n=a,t,g or c

SEQ ID NO: 5941 - DNA, 283 bp, Homo sapiens
acagtgcaagggttttaatagtccacactaaaataggctgtacagttttgtagtttaacattaaaagcaatcctgccttattttaaaatgcttctacttaagaatgcttcttcctcccccactccttcacttaaggtataagtctacccctaaagtgcatttctcaggcattaaaaacagcactgtgatttgctttccacagagtcctaaataacagccaccttcttcatttgagaggctacagagttcaagctgagctgtgacaggagccagggggccaggg

SEQ ID NO: 5942 - DNA, 315 bp, Homo sapiens
cgggtaaatgaatatgtttatttaaatatgtatacaagcatggccctaggagcagcagatacactttcccaaaggtggttgcttcctttaagatattgcacaatagaaaataaactcttgtcaatccttaaaattagtcttcaatgctatgtattttagctatgtaacttgtactgtgtcaacagtgaaccttattagattcacggtgtcatcgaacttatagcaagataaaaatcaatcagtaggaatgtcattttaaaaagtaaaatagtgggacggttgtggtggctcatgcctgtaatcccagcactttgg

SEQ ID NO: 5943 - DNA, 221 bp, Homo sapiens
tatacaatttataatctcttaaaggaagcaataaacatttaaactattggactactgggatgtacattttaccagataccagcatcataatcttataactctatatgaaagtttgaaaaaataattataaagtttatttaaatgttgattgtcccaaggtctacagtttcttttctgatgtgtcatcagtgacaaagagtaaaaaaaggaaactcccatat

SEQ ID NO: 5944 - DNA, 385 bp, Homo sapiens
ttaatcctaattgtatttctctattcctgaagagttctgtaacatgatgtgttgattggttgtgttaatgttggtccctggaataagattctcatcatctccttcaatcaagcagtcccactgatcaaaatctttatgaagtcctaaatgcttttgtaagaatgctaatgaagctttgttgctaaggatcaatagctgcatttgaatctatgtctccctttaatttgaggcatgtgtccaattattttgccagttgcaaaaggtgaagtcaggcaaaattctgggtgggactggaacccctggattggtaatcatctttctttctttatcgggtgaggtaggccatttttttcatttttatggatataggccggggtattggggg

SEQ ID NO: 5945 - DNA, 431 bp, Homo sapiens
accaagcaaatgttcacatttattaatacaggttatgtttttaagaatgaacataaaaacagtgacatactattttgtaagtacattaatgatatcatattttaatatatacagactaataaacaatgacagtaaatcttcactgatttagataaaatgaatagtcactaaattaataaaaccagtgctagcttctacttacaatacagttatattacttttatgtaagttattctatggtatttggaaatagtttgctcttttatttttttattttttatttatttttattttttgagatggagtcttgctctgttgcccaggctgggaggcacagtggcgcgatctcggctcactacaaggtccgcctcctggggttcacgcccagtctcccggcctcagcctccccgagtagccgggggactacaggg

SEQ ID NO: 5946 - DNA, 464 bp, Homo sapiens
  misc_feature (1)..(464): n=a,t,g or c
catgaaccttatttgttcaactattttatttttatttttattttattattttttttttagctcttttgatttgggccaaatctttcctcacctattgactaatctctggcatctcactggatctcaaacctccacctgcctattaaagtccccaccacaggtcctaatttaagctcttgccagacagttccaccttgctgtgaatgcagaaatgagatcaagtcccactcagaagaaaccagaagatgtgaggtaaccagaggggcggctcagcctccagggcacgaggagccataatctacctggggccttaccattttccagaaggtccaaagatccctctctgtggcttccttggtagttttcaagggcaaaccttaggcgccatctgcttggatctccatctggagaatctgggcctttaaaacaggtttacttgtggttttaagattctttncccctan

SEQ ID NO: 5947 - DNA, 452 bp, Homo sapiens; identical to SEQ ID NO: 3662
  misc_feature (1)..(452): n=a,t,g or c

SEQ ID NO: 5948 - DNA, 511 bp, Homo sapiens
  misc_feature (1)..(511): n=a,t,g or c
actgaaaactagttttattttaaaattaagtgcatagntcatctaattccattggtgtagactttagcaccatacttgctatttgcaattaatgtcgtaacagatacattttggtttgcagtctgtacttgagtagtgtttatttagtggactttggtaaagcccttcatacatattaatctcttcacagtacacatttaatgatggtccagtattctcaaaaaaaaaaaaaagcctactttaaagactaatcaataaattaaacaaaacaaaacccaaacaatgttcccccaccccccaaagctagcagttgtgagttgtatttatattgaaacctaatgttttaaaaatagttctggttctccaaccaccccatcccaccccgggtatgcagcaatagtaatcaattattttattctaccctcccaaaagattattaatccagtgttctttagctttttaaaatataaattgggaaagtgttattaataagcttttttaaaaggcatat

SEQ ID NO: 5949 - DNA, 445 bp, Homo sapiens; identical to SEQ ID NO: 205
  misc_feature (1)..(445): n=a,t,g or c

SEQ ID NO: 5950 - DNA, 322 bp, Homo sapiens; identical to SEQ ID NO: 2640
  misc_feature (1)..(322): n=a,t,g or c

SEQ ID NO: 5951 - DNA, 198 bp, Homo sapiens
tagtattatgtgcactgaattaaggtattgaaattcaatcacttcattgatacctcaaagaacagcctaaaggcaaatgtttcaaaaataatgagctgacacataagaagactgctcacaattagtgtaaatcatggacaatgggcagaggcactaaactgtcaccagttcttgtcatataattctggtcaaacataa

SEQ ID NO: 5952 - DNA, 374 bp, Homo sapiens
  misc_feature (1)..(374): n=a,t,g or c
gaaacagtttaaacattttattttagatgtctttttcttttttttccccgaaagcccgctggctcctaggttggctgttgcctaggacagcgaagccgtctgtggttctgcactctgaggtacagagaaggccagagcgtcacagggaggctcaggacgtcagggagctgagggcctaagataaataaagtaaaaacaaccgctgttcgagactcaagtcccctgttctctcgcctcacgcgggcacagggagcccccgggncgcacactggccaggggcggacntgngactcccggagagccgccgtctccgcttcgccgcccttcgcgcgccccacttcagcctttcagcgtaaggcaggaaccttttttcn

SEQ ID NO: 5953 - DNA, 368 bp, Homo sapiens
atgtgcattatttttttcaagcagctaccttgttaggacatacttaatagttatcttggcctacctactgcacttactaaacaactgttcactttttaatttttaattttcagatttttttgagacggattgttactctatcgcccaggctggagtgcagtggcgtgatctctgctcactgcaacctccgcctcccgggttcaagctattctcctgcctcagcctcctgagtatctgggactacaggtgtgcgccaccacatccagctaatttttgtatttttagtagagatggggttttaccatgttggccaggctgatctggaactcctgacctcaggtgatccacctgcctcggtctcccaaagc

SEQ ID NO: 5954 - DNA, 337 bp, Homo sapiens; identical to SEQ ID NO: 535
  misc_feature (1)..(337): n=a,t,g or c

SEQ ID NO: 5955 - DNA, 246 bp, Homo sapiens; identical to SEQ ID NO: 2667

SEQ ID NO: 5956 - DNA, 460 bp, Homo sapiens
  misc_feature (1)..(460): n=a,t,g or c
taacaaaacaaaacatgtttttattgtttgattaacaaactggttgggggaagggcaagaataagacatgcggggaaataccagctttgattagtcagaaactcctgttatctgtacaaaaaaatgaatgttacaaaaatcacgtaaaaaaactaggctcaaggaagcagccgcccttgcaagagggctcaaggcacctgggaggctgagaagaggccaacctggccatgggcgtggctgcatggacagctcttccctcctgcccttccccagatgcccttccctcctgccccgagggaccactccctctccccaattacaggtgctacaaaactgccttgaataccaccgccaaggcactgccagagatgaaatgggccctggagcagagcctcaggtcttccctcccctgtagcccaggcctggagaaaggagggcttgttcccaggnccaggtgggc

SEQ ID NO: 5957 - DNA, 424 bp, Homo sapiens
tcttattcagtctccgtagagactgtcaaaaattgccagcgctgattatatttcaagtcatcacggtggggtattgggaaaatttccaattagcaataatcgcgtctcggataaatctcattggctacggtactgccactgtgcaaagctagcttgacgtaggactttgatggtcatgtataacacctcacaggggcagaacctcctccatccccgactccaaagactcatgtaatcagtacgcaagaaagttcagagatgagacctctggttgtattccacctttgggacatgggggatgtctttagttcaaagtcacaaataaatgcaggttctacaattcagaggcttcatatccctgctggagtattacatgtttattcaggatggaccacttttcttagcaacagtttctaaacctttg

SEQ ID NO: 5958 - DNA, 327 bp, Homo sapiens
tttggaaaaagaaataaactattttaatgtctgataattatggggtagcccttgcattgcaagatgatgatttgattatggacacattatcaacagaattgaatttgcatggaactcaagacacgcttaagatcaccacagcataactgcagatttcaggaattacagtcatagagggtacatcaacttgaagagtagattgagtcttacaggaagtgagttacaataagtaacattaagagcccagctgccagcctgggattacaggcgtgacgactgggtccggcctgctttttttttttttttttttttttttttggagacgga

SEQ ID NO: 5959 - DNA, 299 bp, Homo sapiens; identical to SEQ ID NO: 4539

SEQ ID NO: 5960 - DNA, 217 bp, Homo sapiens
  misc_feature (1)..(217): n=a,t,g or c
aagaaaatcacgntttaatgtctggtcctcgatcaccttagcacagcgnttctctgnggngaaatgccagcnctgccgcatggtgcagggaatggtcggggggaagcctgcagcccaggcctgctacaagtctagtgactgcagccagggggcctcccctgccgcataaagtgcttgaacagagccgccgtgcctcanaggactgggcctgtcctgg

SEQ ID NO: 5961 - DNA, 210 bp, Homo sapiens; identical to SEQ ID NO: 2677
  misc_feature (1)..(210): n=a,t,g or c

SEQ ID NO: 5962 - DNA, 448 bp, Homo sapiens; identical to SEQ ID NO: 391

SEQ ID NO: 5963 - DNA, 354 bp, Homo sapiens; identical to SEQ ID NO: 3943

SEQ ID NO: 5964 - DNA, 435 bp, Homo sapiens
tttgagcctcacagttttattttctcctcgttatccatccttcctttcagcaccagtaaggaaaaagaacacctctcttcgcaaaatattttatcaggtgtaaagacttgtttttcttctagggaagaaccgtctggatatatatttgataatgtttttaccaaaaccataggtgtgcttaccatagaaaacccctaatgtcccatgaagatacaatacagaaaaaaatacagaaattaaaaaagtttttataacagtatttctaaatctcagcaagttaaaaagcaatagttaaaaagcatcaagattaatatacttaaaacttaaggtggttttggacaaatgaaaatgaacatttccttcctcagtggcccccgcgccttgtggcttcctttgagactgggcctagggcaggaacagagtcttggtatgggc

SEQ ID NO: 5965 - DNA, 321 bp, Homo sapiens
gtcttttattatttttttactgtccagtgcaggaaaagtctcacaaaatttcacagacctaaaatgtgcaagctagttctctttctatacagcaatattgggattcttttgaaattagcccagaaatgaattatttacacacatgaaagatgcatgcttggggttcttttatgtaagaaagagcagaaaaacttctaataaaaatagattaaatatatatatatatatttatactgggtaaggaaaacaaaagtttagtctctcctagtcacaaactcattctctctacccacaacattggattttagacagcacacatca

SEQ ID NO: 5966 - DNA, 335 bp, Homo sapiens; identical to SEQ ID NO: 2983

SEQ ID NO: 5967 - DNA, 448 bp, Homo sapiens; identical to SEQ ID NO: 406

SEQ ID NO: 5968 - DNA, 413 bp, Homo sapiens
agatttaaaaaacatttattttaataagactattgcaaacacattaaaaaaactaaatagtaatattacaaaatctatatacttgcacatttagtatttgtcaatgtgccagaggttttcttcatgaaatttgacttctttgaagtgaaggcttttttccatcatctcttatagctctgactgaataagtcttaatgctttcttcatgttttctatcaataggggtaaatcccgaggctcatatgtgtacaatctgttagagtatcttccagctatgtcagctctaactgttaaagaagggtctacaaacatgattctaggcacatattgcccatcaggtgataaattcttatcagtggtttcatgcataaggtttagcatgatgaacttattctgagccatttcttgtattt

SEQ ID NO: 5969 - DNA, 505 bp, Homo sapiens
tttttttttagagaccggatttcactccacaggtattgacttagtgtattacatgaccataggcactaactgctggccactcctgtcaacctcaagtgaggtatcagtagtaaagttcatccggactgtgtttacacactattccaaagggaaaattaaagtatccagaagagtttaaagagtctcaaaaactattttgaatgcaaactggtagtaatgaaagtgtacacattattttcagatgaaatcttcaaaacagacgcacttttgaacttagcatccccagtttgatgcacctggatacatgggctgtgctcgacctaaaacgtgtgtctgttcgtttctgaaaataggactgtgttgttctacagctatagcctacctccttggtcctctcctacatccatttgaaaaatctttgaaaatgggaagagatttttaaaactcagacaacggtcaacttgaggttcaaactggttctagtttgaagttctaaaattaactt

SEQ ID NO: 5970 - DNA, 376 bp, Homo sapiens
tttttagatatttatatatattcatcgacatagaagtccacgagatacattatttggtgaaaaatacacagtatagaacagcacttatatttggtcactcttatctatacatatatctatctgggtacacaggtacagggagatatctggaaggacattcaccaaagggctgacaatggttacaaaagggtgctgagtttcaggtaatttgtactttagtttttgtatcttcctttatttttgaaggtttaatgaaaagatgctcctttcataaaaagtataaagtcatcaaagaaatagacacatggagaatagacccttaagccagcagagaagagagcagggacagaggtcacaccattccccatccactgtg

SEQ ID NO: 5971 - DNA, 339 bp, Homo sapiens
  misc_feature (1)..(339): n=a,t,g or c
aatagacagaagantttaatacatgtnatgctttgccttccatttacactatcataaatnacaaagtattgtccanttcacanaataaaaccatttccagataattttttgacagtatcaagangtacataaactacaacaaacaaatctgtacagttgggaggngggntaatagcagggaagaggtcaaacctccctgtgccaatggngtccatctgcatagcccttgggactgtccaggtcaacagtcacacaatgatgctccacgtaaaatagtcattctcttctgctcactccaaagcaagactggtgagtttacacaantcatctcantcaaag

SEQ ID NO: 5972 - DNA, 317 bp, Homo sapiens
  misc_feature (1)..(317): n=a,t,g or c
tttgaacatttaataaaaatgtttaggttgatatcttaaagttgtcagtgaaatctcagatttacataacagtttgcatccagtagtttttttgagtaacacaaacatcagtatagccaaatgttaactcttatcacttttngtgttaataacaaagtaatattngtaatatagtgtccctgaataactataaaancttcttggnattatttngtttttnaaataaaacactatttaataactggtatcatagcccttcaaaagacacattctgaaatgctatcagtcagggggcaaaagttgttttagttcagttt

SEQ ID NO: 5973 - DNA, 433 bp, Homo sapiens; identical to SEQ ID NO: 2707

SEQ ID NO: 5974 - DNA, 450 bp, Homo sapiens
  misc_feature (1)..(450): n=a,t,g or c
tttcaagtcacagattacatatatttacattaattcaaatgtccaaagcacagtacagtagggtctatttaatagttcacataatttaagatttacatatacacaagcacatgaaccaatattagtttgctagaacagggatttaagaagttactcagacattttggtattgacacttacatatttatggcaacaaattatgatgactttaaattttcaatgagatcttttgtacaagaatacagaatgggaagaatgtacaaaatgaaaagacaggcaaacaaatgtactttccttggcactatttctataacaccatatagggttgtgggcctcggtgccgaaattccctggcaagccccggggggttcccacctaagttctnaggagccgggccgccacccgngttggaagctcccagctttttggttcccctttaggtgagggtta

SEQ ID NO: 5975 - DNA, 439 bp, Homo sapiens
  misc_feature (1)..(439): n=a,t,g or c
aacaagaagaaaaataatgctccacatagaaatgacttcaaaattcatgcaaccatgcacaacctaaactatctgtacttcccttttttatttacccaaaagtttttgagtaaactgaaagttagatactccaggaacagcaactcattgagcaataaggcagtttaaaaatatacatatacatgtactattcattgtttctcagaacagttttagagctttantcttntaaacttacacagttgtgaaagaaataaagccaaccacaaaataagaatcaatggaatgcagtaatccatatataanagacagtcaaatgtgcttatacgtattcaagaaatcaatattctaagctggtaaataataaatttatccaatggtagccactaaaccaaatttatgatccagaataaacccttccggtttcnttaattttggn

SEQ ID NO: 5976 - DNA, 340 bp, Homo sapiens
  misc_feature (1)..(340): n=a,t,g or c
caggaaatcctatttattttacaccattacaaaaatatttaggcacataattttcatgtttatgtcacctgatttacatacctcaattcctcagtaccttttaacactaaaaatggncatttgggnaaatagactctaaaatgaaaaaatactgtgagganggctaacacctgtaggacaaaaatcagttgatcatcagcatgaggaaaggaaaacatttgtggaaaaaaataatcttctaaaaacatttttgtgnggggcantaaatctaaccngtggggtttcttttttaaaagggttttttttaaggggnccaggcttttttnaaaaaaaaaancta

SEQ ID NO: 5977 - DNA, 484 bp, Homo sapiens
  misc_feature (1)..(484): n=a,t,g or c
ttttttttcgttttataatgtttgttttatactgaggcatgttttcggttccagttgttcacatgcagtctgctgtgagactccaagatcaagggtgctgggaggccttaggaagtcaccttacttatctaagactgtttccccacctggaagatgccctacaagcctcctgtggctgtgtttagaaagcatgcccggcctttcttgacagccagccaccccagatgatggcagggcaaggaagactgttaggagtcagagtgctcccctcaggtggaaggaaactgggccaactctactttgtaagccatagggtgccaggtagcccggccaccctgagcctgtgcctccactgcccccgcgtggccagtcaggtgcagctgctcccagagatggagggtnaggaacagacgtggggagcaccagagggacagagttgatggctgacgtttttttaggagggcaccccaaggccttttntttt

SEQ ID NO: 5978 - DNA, 485 bp, Homo sapiens
  misc_feature (1)..(485): n=a,t,g or c
agagcgcaaagcagttttattctagcgagcaagggagtgagcgtccaggnaggagcaggtntaacccggcggtcagtggagcctcagtgaggtgtgtcctgttttttcctgcaatcgccgcagaagacaccaatggtcgcgttcaccagctggatcccacacagtactatctccaggcaggaggcggccaccagcagcgagaagagcgtcacattccaggggaccacgcgagggggcgcctcgaaccgntcgcatagagtgcggttnagcaagtaagctcccgcgntgtnttcgaagtggtagccccactcgccnttcattaagcatctgggtccatttnggagcccagnttcagnacaccgagaggcagtagatgggcaccaagcaccccgaacgccgagggagaagaccgagcgcaattccttgcagcggttttccacagcacccagcaccacagcagcctttgccccttncccgaacggttg

SEQ ID NO: 5979 - DNA, 199 bp, Homo sapiens
  misc_feature (1)..(199): n=a,t,g or c
ttttaccagttctcgattttatttaggactcaaattaacaccaaccaaacatatcactaactcacttatttccacatttccaaagttggattgtgctgcaaatccatacatttgtgctcactacacatttttttaattacattcattgagnggctccaaagcatcagtccaataaacatttttccagcccgaaaaccat

SEQ ID NO: 5980 - DNA, 375 bp, Homo sapiens; identical to SEQ ID NO: 5841
  misc_feature (1)..(375): n=a,t,g or c

SEQ ID NO: 5981 - DNA, 275 bp, Homo sapiens
  misc_feature (1)..(275): n=a,t,g or c
atttatatatatttatncagtaaacacaattgtttcatgtaccagatttttaatgcatttgaatctttattctacaacacaagcaacataaatacaatatcttttaaaatatttcctctttagaatttncatttccacctcagataaaatgtacacaaaatacacttgcaagcttgcttacagagacctgttaaacaaagaacagacagattctataaaatcagttatatcaacatataaaggagtgtgattttcagtttgtttttttaagtaaa

SEQ ID NO: 5982 - DNA, 1190 bp, Homo sapiens
gtcagcagccccgacagccgacagtcacagcagctctgacaagagcgttcctggagcccagctcctctccacagaccacaagcacccagcagagaccatgggccccccctcagccgctccccgtggagggcacaggccctggcaggggctcctgatcacagcctcacttttaaccttctgggacccgcccaccactgtccagttcactattgaagccctgccatccagtgctgcagagggaaaggatgttcttctactggcctgcaatatttcagaaactattcaagcctattattggcacaaggggaaaacggcagaagggagccctctcattgctggttatataacagacattcaagcaaatatcccaggggccgcatacagtggtcgagagcaagtataccccaatggatccctgctgttccaaaacatcaccctggaggacgcaggatcctacaccctacgaaccataaatgccagttacgactctgaccaagcaactggccagctccacgtacaccaaaacaacgtcccaggccttcctgtgggggccgtcgctggcatcgtgactggggtcctggttggggtggctctggtggccgccctggtgtgttttctgcttctctccaggactggaagggccagcatccagcgtgacctcagggagcagccgcccccagcctccacccctggccatggtccctctcacagatccaccttctcggcccctctacccagccccagaacagccactcccatctatgtggaatttctatactctgatgcaaacatttactgccagatcgaccacaaagcagatgtggtctcttaggttcctctgggagctgctcttgtgggttgatggagcgtcctcgaagctccagccctggggacggggaaggacatggagcctgagccagagaaccagctctgagtcctgaggagacacaggcctggggacagggagggatgggagtccctgctgaatatctggagaccctgacaggttgccctgggctccgggtgggccgggacaaaggcctctcatcaccacaggaagcgggggcttgcaaggaaagtgaatgggcctgtggcccacccggggtcaccaggaaaggatctgaataaagaggacccttcctctcattggctctttttctgctcacgggaacttagcagaaactcacctg

SEQ ID NO: 5983 - DNA, 2497 bp, Homo sapiens; identical to SEQ ID NO: 3969

SEQ ID NO: 5984 - DNA, 2099 bp, Homo sapiens
aagaagctgccgttgttctgggtactacagcagaagggtatgcggaagcgagcaccccagtctgagatggctcctgccggtgtgagcctgagggccaccatcctctgcctcctggcctgggctggcctggctgcaggtgaccgggtgtacatacaccccttccacctcgtcatccacaatgagagtacctgtgagcagctggcaaaggccaatgccgggaagcccaaagaccccaccttcatacctgctccaattcaggccaagacatcccctgtggatgaaaaggccctacaggaccagctggtgctagtcgctgcaaaacttgacaccgaagacaagttgagggccgcaatggtcgggatgctggccaacttcttgggcttccgtatatatggcatgcacagtgagctatggggcgtggtccatggggccaccgtcctctccccaacggctgtctttggcaccctggcctctctctatctgggagccttggaccacacagctgacaggctacaggcaatcctgggtgttccttggaaggacaagaactgcacctcccggctggatgcgcacaaggtcctgtctgccctgcaggctgtacagggcctgctagtggcccagggcagggctgatagccaggcccagctgctgctgtccacggtggtgggcgtgttcacagccccaggcctgcacctgaagcagccgtttgtgcagggcctggctctctatacccctgtggtcctcccacgctctctggacttcacagaactggatgttgctgctgagaagattgacaggttcatgcaggctgtgacaggatggaagactggctgctccctgatgggagccagtgtggacagcaccctggctttcaacacctacgtccacttccaagggaagatgaagggcttctccctgctggccgagccccaggagttctgggtggacaacagcacctcagtgtctgttcccatgctctctggcatgggcaccttccagcactggagtgacatccaggacaacttctcggtgactcaagtgcccttcactgagagcgcctgcctgctgctgatccagcctcactatgcctctgacctggacaaggtggagggtctcactttccagcaaaactccctcaactggatgaagaaactgtctccccggaccatccacctgaccatgccccaactggtgctgcaaggatcttatgacctgcaggacctgctcgcccaggctgagctgcccgccattctgcacaccgagctgaacctgcaaaaattgagcaatgaccgcatcagggtgggggaggtgctgaacagcattttttttgagcttgaagcggatgagagagagcccacagagtctacccaacagcttaacaagcctgaggtcttggaggtgaccctgaaccgcccattcctgtttgctgtgtatgatcaaagcgccactgccctgcacttcctgggccgcgtggccaacccgctgagcacagcatgaggccagggccccagaacacagtgcctggcaaggcctctgcccctggcctttgaggcaaaggccagcagcagataacaaccccggacaaatcagcgatgtgtcacccccagtctcccaccttttcttctaatgagtcgactttgagctggaaagcagccgtttctccttggtctaagtgtgctgcatggagtgagcagtagaagcctgcagcggcacaaatgcacctcccagtttgctgggtttattttagagaatgggggtggggaggcaagaaccagtgtttagcgcgggactactgttccaaaaagaattccaaccgaccagcttgtttgtgaaacaaaaaagtgttcccttttcaagttgagaacaaaaattgggttttaaaattaaagtatacatttttgcattgccttcggtttgtatttagtgtcttgaatgtaagaacatgacctccgtgtagtgtctgtaataccttagttttttccacagatgcttgtgatttttgaacaatacgtgaaagatgcaagcacctgaatttctgtttgaatgcggaacaatagctggttatttctcccttgtgttagtaataaacgtcttgccac

SEQ ID NO: 5985 - DNA, 1877 bp, Homo sapiens
gccccaggagtctttcccgattcttgctcactgctcacccacctgctgctgccatgaggcaccttggggccttcctcttccttctgggggtcctgggggccctcactgagatgtgtgaaataccagagatggacagccatctggtagagaagttgggccagcacctcttaccttggatggaccggctttccctggagcacttgaaccccagcatctatgtgggcctacgcctctccagtctgcaggctgggaccaaggaagacctctacctgcacagcctcaagcttggttaccagcagtgcctcctagggtctgccttcagcgaggatgacggtgactgccagggcaagccttccatgggccagctggccctctacctgctcgctctcagagccaactgtgagtttgtcaggggccacaagggggacaggctggtctcacagctcaaatggttcctggaggatgagaagagagccattgggcatgatcacaagggccacccccacactagctactaccagtatggcctgggcattctggccctgtgtctccaccagaagcgggtccatgacagcgtggtggacaaacttctgtatgctgtggaacctttccaccagggccaccattctgtggacacagcagccatggcaggcttggcattcacctgtctgaagcgctcaaacttcaaccctggtcggagacaacggctcaccatggccatcagaacagtgcgagaggagatcttgaaggcccagacccccgagggccactttgggaatgtctacagcaccccattggcattacagttcctcatgacttcccccatgcgtggggcagaactgggaacagcatgtctcaaggcgagggttgctttgctggccagtctgcaggatggagccttccagaatgctctcatgatttcccagctgctgcccgttctgaaccacaagacctacattgatctgatcttcccagactgtctggcaccacgagtcatgttggaaccagctgctgagaccattcctcagacccaagagatcatcagtgtcacgctgcaggtgcttagtctcttgccgccgtacagacagtccatctctgttctggccgggtccaccgtggaagatgtcctgaagaaggcccatgagttaggaggattcacatatgaaacacaggcctccttgtcaggcccctacttaacctccgtgatggggaaagcggccggagaaagggagttctggcagcttctccgagaccccaacaccccactgttgcaaggtattgctgactacagacccaaggatggagaaaccattgagctgaggctggttagctggtagcccctgagctccctcatcccagcagcctcgcacactccctaggcttctaccctccctcctgatgtccctggaacaggaactcgcctgaccctgctgccacctcctgtgcactttgagcaatgccccctgggatcaccccagccacaagcccttcgagggccctataccatggcccaccttggagcagagagccaagcatcttccctgggaagtctttctggccaagtctggcagcctggcctgcaggtctcccatgaaggccaccccatggtctgatgggcatgaagcatctcagactccttggcaaaaaacggagtccgcaggccgcaggtgttgtgaagaccactcgttctgtggttggggtcctgcaagaaggcctcctcagcccgggggctatggcccttgaccccagctctccactctgctgttagagtggcagctccgagctggttgtggcacagtagcttggggatgacctcagcagggctgctcagtgcctgcctctgacaaaattaaagcattgatggcctgtggacctgc

SEQ ID NO: 5986 - DNA, 3311 bp, Homo sapiens; identical to SEQ ID NO: 996

SEQ ID NO: 5987 - DNA, 871 bp, Homo sapiens
tcctccacctgctggcccctggacacctctgtcaccatgtggttcctggttctgtgcctcgccctgtccctgggggggactggtgctgcgcccccgattcagtcccggattgtgggaggctgggagtgtgagcagcattcccagccctggcaggcggctctgtaccatttcagcactttccagtgtgggggcatcctggtgcaccgccagtgggtgctcacagctgctcattgcatcagcgacaattaccagctctggctgggtcgccacaacttgtttgacgacgaaaacacagcccagtttgttcatgtcagtgagagcttcccacaccctggcttcaacatgagcctcctggagaaccacacccgccaagcagacgaggactacagccacgacctcatgctgctccgcctgacagagcctgctgataccatcacagacgctgtgaaggtcgtggagttgcccacccaggaacccgaagtggggagcacctgtttggcttccggctggggcagcatcgaaccagagaatttctcatttccagatgatctccagtgtgtggacctcaaaatcctgcctaatgatgagtgcgaaaaagcccacgtccagaaggtgacagacttcatgctgtgtgtcggacacctggaaggtggcaaagacacctgtgtgggtgattcagggggcccgctgatgtgtgatggtgtgctccaaggtgtcacatcatggggctacgtcccttgtggcacccccaataagccttctgtcgccgtcagagtgctgtcttatgtgaagtggatcgaggacaccatagcggagaactcctgaacgcccagccctgtcccctacccccagtaaaatcaaatgtgcatcc

SEQ ID NO: 5988 - DNA, 2106 bp, Homo sapiens
agatggtagaacctccttagagcaaaaggacacagcagttaaatgtgacatacctgattgttcaaaatgcaaggctctggacattgcattctttgacttttattttcctttgagcctgtgccagtttctgtccctgctctggtctgacctgccttctgtcccagatctcactaacagccatttccctaggtcatagaagagaacaaagtgcggcagtacgattccatccagaaactgctgaacgagaggagcctcttccggcaagccatcagcccctccgacagggtgaagctctttccccaccggaactcaagcaagtgcaagtctaagccccagattgctgctctgaaagaggagacagaagaagaggtgcaagatacaaggctttagagagcagcataaatgttgacatgggacatttgctcatggaattggagctcgtgggacagtcacctcatggaattggagctcgtggaacagttacctctgcctcagaaaacaaggatgaattaagtttttttttaaaaaagaaacatttggtaaggggaattgaggacactgatatgggtcttgataaatggcttcctggcaatagtcaaattgtgtgaaaggtacttcaaatccttgaagatttaccacttgtgttttgcaagccagattttcctgaaaacccttgccatgtgctagtaattggaaaggcagctctaaatgtcaatcagcctagttgatcagcttattgtctagtgaaactcgttaatttgtagtgttggagaagaactgaaatcatacttcttagggttatgattaagtaatgataactggaactcagcggtttatataagcttgtattcctttttctctcctctccccatgatgtttagaaacacaactatattgtttgctaagcattccaactatctcatttccaagcaagtattagaataccacaggaaccacaagactgcacatcaaaatatgccccattcaacatctagtgagcagtcaggaaagagaacttccagatcctggaaatcagggttagtattgtccaggtctaccaaaaatctcaatatttcagataatcacaatacatcccttacctgggaaagggctgttataatctttcacaggggacaggatggttcccttacctgggaaagggctgttataatctttcacaggggacaggatggttcccttgatgaagaagttgatatgccttttcccaactccagaaagtgacaagctcacagacctttgaactagagtttagctggaaaagtatgttagtgcaaattgtcacaggacagcccttctttccacagaagctccaggtagagggtgtgtaagtagataggccatgggcactgtgggtagacacacatgaagtccaagcatttagatgtataggttgatggtggtatgttttcaggctagatgtatgtacttcatgctgtctacactaagagagaatgagagacacactgaagaagcaccaatcatgaattagttttatatgcttctgttttataattttgtgaagcaaaattttttctctaggaaatatttattttaataatgtttcaaacatatattacaatgctgtattttaaaagaatgattatgaattacatttgtataaaataatttttatatttgaaatattgactttttatggcactagtatttttatgaaatattatgttaaaactgggacaggggagaacctagggtgatattaaccaggggccatgaatcaccttttggtctggagggaagccttggggctgatcgaggttgttgcccacagctgtatgattcccagccagacacagcctcttagatgcagttctgaagaagatggtaccaccagtctgactgtttccatcaagggtacactgccttctcaactccaaactgactcttaagaagactgcattatatttattactgtaagaaaatatcacttgtcaataaaatccatacatttgtgtgaaactttgttgttttcagatgcgttcacttgtcatgtttcatcagtctctcactccaatttctaagcttcatggaacatgaaacacgaatctgtcttttagatatagcctc

SEQ ID NO: 5989 - DNA, 2366 bp, Homo sapiens
ggcctccccgcccgcctgcccctcggaggaggacgagagcctgaagggctgtgagctgtacgtgcagctgcacgggatccagcaggtcctcaaagactgtatcgtccacctctgcatctccaagcccgaacgccccatgaagttcctccgggagcacttcgagaagctggagaaggaagaaaacaggcagattttggcgcggcaaaagtcaaactcacagtcggactcccatgatgaggaggtgtcgcccacccccccgaaccctgtggtgaaggcccgccgccggcgaggaggcgtgagtgccgaggtgtacaccgaggaggacgccgtgtcctacgtcaggaaggtgattcccaaggactacaaaaccatgactgcgctggccaaggccatctccaagaacgtgctcttcgctcacctggatgacaacgagaggagtgacatattcgatgccatgttccctgtcactcacatcgctggggagactgttatacagcaagggaatgaaggagacaacttctatgtcgttgatcaaggggaagtggatgtgtacgtgaacggagagtgggtgaccaacatcagcgagggaggcagcttcggggagctggcgctcatctacggcacccccagggctgcgaccgtgaaagccaagacggacctcaagctctgggggatcgaccgggacagctaccggcgcatccttatgggcagcacgctgaggaaacgcaagatgtacgaggagttcctcagcaaggtctccatcctagagtccctggagaagtgggagcgtctgaccgtggcggatcggctggagcccgtccagtttgaagatggagagaaaattgtggtccagggagagcctggggacgacttttacatcatcacggagggcaccgcgtccgtgctgcagcgccggtcccccaatgaggagtacgtggaggtggggcgcctgggaccctctgactacttcggggagattgcactgctgctgaaccggccccgggcggccactgtcgtggcccgggggcccctcaagtgtgtgaagctggaccggccccgcttcgagcgtgtgctggggccctgctctgagatcctcaagaggaacattcagcgttacaacagcttcatctccctcaccgtctgagcacacgtcccgccctgcagccccagctccccagtgtggtggccgtgcctgctcgtctgtgtcgggggcccgggagccgctgtgtgaggtgtgggccgggtggggctgggtcccggcagcgtgaggactgccccttccccggactcactttttggaataaatgatcaccttgtgcatttccaaatcaaaggacaagcggacaaaatgcatcccaagatcaaggaagggacaggccagcttcctccccacacgcctccccggctgcctctgtgggcttctcctggggggcccaccccacccctgccagtctcctggagatgcttgaggatcggtcctccccagaaccaggccaggacgttgcccctggcggctggtgaccctgtgaggtcaggtcccccagattgaggtctgagtgtgggcaagtgtgtcaaaaggggctgccccccaggagatgaggctgagagcagggagttgaggccgaagaagtcaaggcccctcccgcaaatgtgtacccctgcccgcgccactgcaccccgccgcacccccacctccccgggggccctgctgcggatcgcggagtgggagagtctctgagctatgagattgatcttgcccctaattggagaggaagccgggcgccaagacacacggggctcctgccttgggagccagggccgcggccgcaggtagaccccagtagggggggccgggctcgaagttcctttgggaggggctggcgggactccagcaggccgtcctcacctttcttagaaagtccacccagggcaagttgatgttgggggaaagcagaagtcaagccagccgcggccccacacgccccgacccgctcaaccgacttgtcccttaaatgtgtcttggatcccgcagtgatgacgtgagccagccaggcccgaaagggtgaggccagtgcagagaagcttcccaggggattcctggttcccccgaaagacaagcgaggtcattgcagttcacccgatgttgctcctgtcccgtgcgtcccggggaggctgtccttggtccgcatggctcgttgcagcccctcccctgctggcggttacgatgcgtggggtccccctccccacccagccccggcaccgtcgccgtgtcccgcctgtgcctgtgacgtccctgtggacctgtgagccatcccccccttatctctgctctgaatactgcatgaagcattaaacgtgcaatgaag

SEQ ID NO: 5990 - DNA, 1930 bp, Homo sapiens
ggagagagagaggacagagagcaagtcactcccggctgcctttttcacctctgacagagcccagacaccatgaacgcaagtgaattccgaaggagagggaaggagatggtggattacgtggccaactacatggaaggcattgagggacgccaggtctaccctgacgtggagcccgggtacctgcggccgctgatccctgccgctgcccctcaggagccagacacgtttgaggacatcatcaacgacgttgagaagataatcatgcctggggtgacgcactggcacagcccctacttcttcgcctacttccccactgccagctcgtacccggccatgcttgcggacatgctgtgcggggccattggctgcatcggcttctcctgggcggcaagcccagcatgcacagagctggagactgtgatgatggactggctcgggaagatgctggaactaccaaaggcatttttgaatgagaaagctggagaagggggaggagtgatccagggaagtgccagtgaagccaccctggtggccctgctggccgctcggaccaaagtgatccatcggctgcaggcagcgtccccagagctcacacaggccgctatcatggagaagctggtggcttactcatccgatcaggcacactcctcagtggaaagagctgggttaattggtggagtgaaattaaaagccatcccctcagatggcaacttcgccatgcgtgcgtctgccctgcaggaagccctggagagagacaaagcggctggcctgattcctttctttatggttgccaccctggggaccacaacatgctgctcctttgacaatctcttagaagtcggtcctatctgcaacaaggaagacatatggctgcacgttgatgcagcctacgcaggcagtgcattcatctgccctgagttccggcaccttctgaatggagtggagtttgcagattcattcaactttaatccccacaaatggctattggtgaattttgactgttctgccatgtgggtgaaaaagagaacagacttaacgggagcctttagactggaccccacttacctgaagcacagccatcaggattcagggcttatcactgactaccggcattggcagataccactgggcagaagatttcgctctttgaaaatgtggtttgtatttaggatgtatggagtcaaaggactgcaggcttatatccgcaagcatgtccagctgtcccatgagtttgagtcactggtgcgccaggatccccgctttgaaatctgtgtggaagtcattctggggcttgtctgctttcggctaaagggttccaacaaagtgaatgaagctcttctgcaaagaataaacagtgccaaaaaaatccacttggttccatgtcacctcagggacaagtttgtcctgcgctttgccatctgttctcgcacggtggaatctgcccatgtgcagcgggcctgggaacacatcaaagagctggcggccgacgtgctgcgagcagagagggagtaggagtgaagccagctgcaggaatcaaaaattgaagagagatatatctgaaaactggaataagaagcaaataaatatcatcctgccttcatggaactcagctgtctgtggcttcccatgtctttctccaaagccatccagagggttgtgattttgtctgcttagtatctcatcaacaaagaaatattatttgctaattaaaaagttaatcttcatggccatagcttttattcattagctgtgatttttgttgattaaaacattatagattttcatgttcttgcagtcatcagaagtggtaggaaagcctcactgatatattttccagggcaatcaatgttcacgcaacttgaaattatatctgtggtcttcaaattgtcttttgtcatgtggctaaatgcctaataaacaattcaagtga

SEQ ID NO: 5991 - DNA, 2314 bp, Homo sapiens
ggaattcccgcccggcccggccccgcgccccgcagccccgggcgccgcgcgtcctgcccggcctgcggcccagcccttgcgccgctcgtccgacccgcgatcgtccaccagaccgtgcctcccggccgcccgggccccgcgtgcatgcttcggtctgggccagcctctgggccgtccgtccccactggccgggccatgccgagtcgccgcgtcgccagaccgccggctgcgccggagctgggggccttagggtcccccgacctctcctcactctcgctcgccgtttccaggagcacagatgaattggagatcatcgacgagtacatcaaggagaacggcttcggcctggacgggggacagccgggcccgggcgaggggctgccacgcctggtgtctcgcggggctgcgtccctgagcacggtcaccctgggccctgtggcgcccccagccacgccgccgccttggggctgccccctgggccgactagtgtccccagcgccgggcccgggcccgcagccgcacctggtcatcacggagcagcccaagcagcgcggcatgccgttccgctacgagtgcgagggccgctcggccggcagcatccttggggagagcagcaccgaggccagcaagacgctgcccgccatcgagctccgggattgtggagggctgcgggaggtggaggtgactgcctgcctggtgtggaaggactggcctcaccgagtccacccccacagcctcgtggggaaagactgcaccgacggcatctgcagggtgcggctccggcctcacgtcagcccccggcacagttttaacaacctgggcatccagtgtgtgaggaagaaggagattgaggctgccattgagcggaagattcaactgggcattgacccctacaacgctgggtccctgaagaaccatcaggaagtagacatgaatgtggtgaggatctgcttccaggcctcatatcgggaccagcagggacagatgcgccggatggatcctgtgctttccgagcccgtctatgacaagaaatccacaaacacatcagagctgcggatttgccgaattaacaaggaaagcgggccgtgcaccggtggcgaggagctctacttgctctgcgacaaggtgcagaaagaggacatatcagtggtgttcagcagggcctcctgggaaggtcgggctgacttctcccaggccgacgtgcaccgccagattgccattgtgttcaagacgccgccctacgaggacctggagattgtcgagcccgtgacagtcaacgtcttcctgcagcggctcaccgatggggtctgcagcgagccattgcctttcacgtacctgcctcgcgaccatgacagctacggcgtggacaagaaggcgaaacgggggatgcccgacgtccttggggagctgaacagctctgacccccatggcatcgagagcaaacggcggaagaaaaagccggccatcctggaccacttcctgcccaaccacggctcaggcccgttcctcccgccgtcagccctgctgccagaccctgacttcttctctggcaccgtgtccctgcccggcctggagccccctggcgggcctgacctcctggacgatggctttgcctacgaccctacggcccccacactcttcaccatgctggacctgctgcccccggcaccgccacacgctagcgctgttgtgtgcagcggaggtgccggggccgtggttggggagacccccggccctgaaccactgacactggactcgtaccaggccccgggccccggggatggaggcaccgccagccttgtgggcagcaacatgttccccaatcattaccgcgaggcggcctttgggggcggcctcctatccccggggcctgaagccacgtagccccgcgatgccagaggaggggcactgggtggggagggaggtggaggagccgtgcaatcccaaccaggatgtctagcacccccatccccttggcccttcctcatgcttctgaagtggacatattcagccttggcgagaagctccgttgcacgggtttccccttgagcccattttacagatgaggaaactgagtccggagaggaaaagggacatggctcccgtgcactagcttgttacagctgcctctgtccccacatgtgggggcaccttctccagtaggattcggaaaagattgtacatatgggaggagggggcagattcctggccctccctccccagacttgacttgaaggtggggggtaggttggttgttcagagtcttcccaataaagatgagtttttgagcctcaaaaaaaaaaaaaggaattcc

SEQ ID NO: 5992 - DNA, 3632 bp, Homo sapiens
aaagagctggaggcgcgcaggccggctccgctccggccccggacgatgcggcgcgcccaggatgctgccgtgcctcgtagtgctgctggcggcgctcctcagcctccgtcttggctcagacgctcatgggacagagctgcccagccctccgtctgtgtggtttgaagcagaatttttccaccacatcctccactggacacccatcccaaatcagtctgaaagtacctgctatgaagtggcgctcctgaggtatggaatagagtcctggaactccatctccaactgtagccagaccctgtcctatgaccttaccgcagtgaccttggacctgtaccacagcaatggctaccgggccagagtgcgggctgtggacggcagccggcactccaactggaccgtcaccaacacccgcttctctgtggatgaagtgactctgacagttggcagtgtgaacctagagatccacaatggcttcatcctcgggaagattcagctacccaggcccaagatggcccccgcgaatgacacatatgaaagcatcttcagtcacttccgagagtatgagattgccattcgcaaggtgccgggaaacttcacgttcacacacaagaaagtaaaacatgaaaacttcagcctcctaacctctggagaagtgggagagttctgtgtccaggtgaaaccatctgtcgcttcccgaagtaacaaggggatgtggtctaaagaggagtgcatctccctcaccaggcagtatttcaccgtgaccaacgtcatcatcttctttgcctttgtcctgctgctctccggagccctcgcctactgcctggccctccagctgtatgtgcggcgccgaaagaagctacccagtgtcctgctcttcaagaagcccagccccttcatcttcatcagccagcgtccctccccagagacccaagacaccatccacccgcttgatgaggaggcctttttgaaggtgtccccagagctgaagaacttggacctgcacggcagcacagacagtggctttggcagcaccaagccatccctgcagactgaagagccccagttcctcctccctgaccctcacccccaggctgacagaacgctgggaaacggggagccccctgtgctgggggacagctgcagtagtggcagcagcaatagcacagacagcgggatctgcctgcaggagcccagcctgagccccagcacagggcccacctgggagcaacaggtggggagcaacagcaggggccaggatgacagtggcattgacttagttcaaaactctgagggccgggctggggacacacagggtggctcggccttgggccaccacagtcccccggagcctgaggtgcctggggaagaagacccagctgctgtggcattccagggttacctgaggcagaccagatgtgctgaagagaaggcaaccaagacaggctgcctggaggaagaatcgcccttgacagatggccttggccccaaattcgggagatgcctggttgatgaggcaggcttgcatccaccagccctggccaagggctatttgaaacaggatcctctagaaatgactctggcttcctcaggggccccaacgggacagtggaaccagcccactgaggaatggtcactcctggccttgagcagctgcagtgacctgggaatatctgactggagctttgcccatgaccttgcccctctaggctgtgtggcagccccaggtggtctcctgggcagctttaactcagacctggtcaccctgcccctcatctctagcctgcagtcaagtgagtgactcgggctgagaggctgcttttgattttagccatgcctgctcctctgcctggaccaggaggagggccctggggcagaagttaggcacgaggcagtctgggcacttttctgcaagtccactggggctggcccagccaggctgcagggctggtcagggtgtctggggcaggaggaggccaactcactgaactagtgcagggtatgtgggtggcactgacctgttctgttgactggggccctgcagactctggcagagctgagaagggcagggaccttctccctcctaggaactctttcctgtatcataaaggattatttgctcaggggaaccatggggctttctggagttgtggtgaggccaccaggctgaagtcagctcagacccagacctccctgcttaggccactcgagcatcagagcttccagcaggaggaagggctgtaggaatggaagcttcagggccttgctgctggggtcatttttaggggaaaaaggaggatatgatggtcacatggggaacctcccctcatcgggcctctggggcaggaagcttgtcactggaagatcttaaggtatatattttctggacactcaaacacatcataatggattcactgaggggagacaaagggagccgagaccctggatggggcttccagctcagaacccatccctctggtgggtacctctggcacccatctgcaaatatctccctctctccaacaaatggagtagcatccccctggggcacttgctgaggccaagccactcacatcctcactttgctgccccaccatcttgctgacaacttccagagaagccatggttttttgtattggtcataactcagccctttgggcggcctctgggcttgggcaccagctcatgccagccccagagggtcagggttggaggcctgtgcttgtgtttgctgctaatgtccagctacagacccagaggataagccactgggcactgggctggggtccctgccttgttggtgttcagctgtgtgattttggactagccacttgtcagagggcctcaatctcccatctgtgaaataaggactccacctttaggggaccctccatgtttgctgggtattagccaagctggtcctgggagaatgcagatactgtccgtggactaccaagctggcttgtttcttatgccagaggctaacagatccaatgggagtccatggtgtcatgccaagacagtatcagacacagccccagaagggggcattatgggccctgcctccccataggccatttggactctgccttcaaacaaaggcagttcagtccacaggcatggaagctgtgaggggacaggcctgtgcgtgccatccagagtcatctcagccctgcctttctctggagcattctgaaaacagatattctggcccagggaatccagccatgacccccacccctctgccaaagtactcttaggtgccagtctggtaactgaactccctctggaggcaggcttgagggaggattcctcagggttcccttgaaagctttatttatttattttgttcatttatttattggagaggcagcattgcacagtgaaagaattctggatatctcaggagccccgaaattctagctctgactttgctgtttccagtggtatgaccttggagaagtcacttatcctcttggagcctcagtttcctcatctgcagaataatgactgacttgtctaattcatagggatgtgaggttctgctgaggaaatgggtatgaatgtgccttgaacacaaagctctgtcaataagtgatacatgttttttattccaataaattgtcaagaccaca

SEQ ID NO: 5993 - DNA, 1686 bp, Homo sapiens; identical to SEQ ID NO: 3730

SEQ ID NO: 5994 - DNA, 2814 bp, Homo sapiens; identical to SEQ ID NO: 499

SEQ ID NO: 5995 - DNA, 1528 bp, Homo sapiens
cagtgccttggtaatgaccagggctccagaaagagatgtccttgtggctgggggcccctgtgcctgacattcctcctgactctgcggtggagctgtggaagccaggcgcacaggatgcaagcagccaggcccagggaggcagcagctgcatcctcagagaggaagccaggatgccccactctgctgggggtactgcaggggtggggctggaggctgcagagcccacagccctgctcaccagggcagagcccccttcagaacccacagagatccgtccacaaaagcggaaaaaggggccagcccccaaaatgctggggaacgagctatgcagcgtgtgtggggacaaggcctcgggcttccactacaatgttctgagctgcgagggctgcaagggattcttccgccgcagcgtcatcaagggagcgcactacatctgccacagtggcggccactgccccatggacacctacatgcgtcgcaagtgccaggagtgtcggcttcgcaaatgccgtcaggctggcatgcgggaggagtgtgtcctgtcagaagaacagatccgcctgaagaaactgaagcggcaagaggaggaacaggctcatgccacatccttgccccccaggcgttcctcacccccccaaatcctgccccagctcagcccggaacaactgggcatgatcgagaagctcgtcgctgcccagcaacagtgtaaccggcgctccttttctgaccggcttcgagtcacgccttggcccatggcaccagatccccatagccgggaggcccgtcagcagcgctttgcccacttcactgagctggccatcgtctctgtgcaggagatagttgactttgctaaacagctacccggcttcctgcagctcagccgggaggaccagattgccctgctgaagacctctgcgatcgaggtgatgcttctggagacatctcggaggtacaaccctgggagtgagagtatcaccttcctcaaggatttcagttataaccgggaagactttgccaaagcagggctgcaagtggaattcatcaaccccatcttcgagttctccagggccatgaatgagctgcaactcaatgatgccgagtttgccttgctcattgctatcagcatcttctctgcagaccggcccaacgtgcaggaccagctccaggtggagaggctgcagcacacatatgtggaagccctgcatgcctacgtctccatccaccatccccatgaccgactgatgttcccacggatgctaatgaaactggtgagcctccggaccctgagcagcgtccactcagagcaagtgtttgcactgcgtctgcaggacaaaaagctcccaccgctgctctctgagatctgggatgtgcacgaatgactgttctgtccccatattttctgttttcttggccggatggctgaggcctggtggctgcctcctagaagtggaacagactgagaagggcaaacattcctgggagctgggcaaggagatcctcccgtggcattaaaagagagtcaaagggt

SEQ ID NO: 5996 - DNA, 1561 bp, Homo sapiens
cgcacgccacccgcccgccgcctgccagagctgctcggcccgcagccagggggacagcggctggtcggaggctcgcagtgctgtcggcgagaagcagtcgggtttggagcgcttgggtcgcgttggtgcgcggtggacacgagggaccccagttcccgcgagcagctccgcgccggccctgagagactaagctgaaactgctgctcagctcccaagatggtgccacccaaattgcatgtgcttttctgcctctgcggctgcctggctgtggtttatccttttgactggcaatacataaatcctgttgcccatatgaaatcatcagcatgggtcaacaaaatacaagtactgatggctgctgcaagctttggccaaactaaaatcccccggggaaatgggccttattccgttggttgtacagacttaatgtttgatcacactaataagggcaccttcttgcgtttatattatccatcccaagataatgatcgccttgacaccctttggatcccaaataaagaatatttttggggtcttagcaaatttcttggaacacactggcttatgggcaacattttgaggttactctttggttcaatgacaactcctgcaaactggaattcccctctgaggcctggtgaaaaatatccacttgttgttttttctcatggtcttggggcattcaggacactttattctgctattggcattgacctggcatctcatgggtttatagttgctgctgtagaacacagagatagatctgcatctgcaacttactatttcaaggaccaatctgctgcagaaataggggacaagtcttggctctaccttagaaccctgaaacaagaggaggagacacatatacgaaatgagcaggtacggcaaagagcaaaagaatgttcccaagctctcagtctgattcttgacattgatcatggaaagccagtgaagaatgcattagatttaaagtttgatatggaacaactgaaggactctattgatagggaaaaaatagcagtaattggacattcttttggtggagcaacggttattcagactcttagtgaagatcagagattcagatgtggtattgccctggatgcatggatgtttccactgggtgatgaagtatattccagaattcctcagcccctcttttttatcaactctgaatatttccaatatcctgctaatatcataaaaatgaaaaaatgctactcacctgataaagaaagaaagatgattacaatcaggggttcagtccaccagaattttgctgacttcacttttgcaactggcaaaataattggacacatgctcaaattaaagggagacatagattcaaatgcagctattgatcttagcaacaaagcttcattagcattcttacaaaagcatttaggacttcataaagattttgatcagtgggactgcttgattgaaggagatgatgagaatcttattccagggaccaacattaacacaaccaatcaacacatcatgttacagaactcttcaggaatagagaaatacaattaggattaaaataggtttttta

SEQ ID NO: 5997 - DNA, 4190 bp, Homo sapiens
gaattccctttcgccggcgccgagttcctggcgccgctcgcccggcccggcttccgaggggagaggacgggctggcggggctggggacccgcgtctcggcccccggagcggggaccacggagacagaccccggcccggcgaccgagctgggcccgtgagccactcggcctcaggtcgctcctgtggttggtccagcccagaatgcagccttgagcctggcttaggccaccacctactccagctctctccaccccctattttactgcagctcagggggtaggctctaggctccaaagtacctgggtattgtcccttcatcaagaaagccccacagctctggagggctctgataatcccgttgtcagctctctgaaaagacagcatggctattaccctacagcccagtgacctgatctttgagttcgcaagcaacgggatggatgatgatatccaccagctggaagacccctctgtgttcccagctgtgatcgtggagcaggtaccctaccctgatttactgcatctgtactcgggactggagttggacgacgttcacaatggcatcataacagacgggaccttgtgcatgacccaggatcagatcctggaaggcagttttttgctgacagatgacaatgaggccacctcgcacaccatgtcaaccgcggaagtcttactcaatatggagtctcccagcgatatcctggatgagaagcagatcttcagtacctccgaaatgcttccagactcggaccctgcaccagctgtcactctgcccaactacctgtttcctgcctctgagcccgatgccctgaacagggcgggtgacactagtgaccaggaggggcattctctggaggagaaggcctccagagaggaaagtgccaagaagactgggaaatcaaagaagagaatccggaagaccaagggcaaccgaagtacctcacctgtcactgaccccagcatccccattaggaagaaatcaaaggatggcaaaggcagcaccatctatctgtgggagttcctcctggctcttctgcaagacagaaacacctgtcccaagtacatcaagtggacccagcgagagaaaggcatcttcaaactggtggactccaaagctgtgtccaagctgtgggggaagcagaaaaacaagcctgacatgaactatgagacaatggggcgggcactaagatactactaccaaagaggcatactggccaaagtggaagggcagaggctggtgtaccagtttaaggagatgcccaaggacctggtggtcattgaagatgaggatgagagcagcgaagccacagcagccccacctcaggcctccacggcctctgtggcctctgccagtaccacccggcgaaccagctccagggtctcatccagatctgccccccagggcaagggcagctcttcttgggagaagccaaaaattcagcatgtcggtctccagccatctgcgagtctggaattgggaccgtcgctagacgaggagatccccactacctccaccatgctcgtctctccagcagagggccaggtcaagctcaccaaagctgtgagtgcatcttcagtgcccagcaacatccacctaggagtggcccccgtggggtcgggctcggccctgaccctgcagacgatcccactgaccacggtgctgaccaatgggcctcctgccagtactactgctcccactcagctcgttctccagagtgttccagcggcctctactttcaaggacaccttcactttgcaggcctctttccccctgaacgccagtttccaagacagccaggtggcagccccaggggctccactgattctcagtggcctcccccaacttctggctggggccaaccgtccgaccaacccggcgccacccacggtcacaggggctggaccagcagggcccagctctcagccccctgggactgtcattgctgccttcatcaggacttctggcactacagcagcccctagggtcaaggaggggccactgaggtcctcctcctatgttcagggtatggtgacgggggcccccatggaggggctgctggttcctgaagagaccctgagggagctcctgagagatcaggctcatcttcagccacttccaacccaggtggtttccaggggttcccacaatccgagccttctgggcaaccagactttgtctcctcccagccgccccactgttgggctgaccccagtggctgaacttgagctctcctcaggctcagggtccctgctgatggctgagcctagtgtgaccacatctgggagccttctgacaagatcccccaccccagcccctttctccccattcaaccctacttccctcattaagatggagccccatgacatataagcaaaggggtcagggcaagtgtgacccaccaggcaaaattgagcagcattttcatagggaccgacttcagtagcacacctgcccctgcatttcagtgggatgtcaatacacttgaccccaagtcccccggccctgcctggtgtcactgtggccaaacagtgcccagcttaagcatccctggcatcagactatggccttcaagagcactagggcatatgcttttggcagcataacgggctgacttggtgatggagggaaaaagccttgagccaggcagaagtttgtggccagggtttgtgcagcagctttgtgagaagagcccttctacctggctctatctcactggctgcattccctacacagggaatttactaccctatatgtgaatatcccctgtatgtacttgtgtgtacttgttggtctgtatcttagtttctttggggaggacagggctgtagctgtgaggtcttgtctccaagggtgtgtgtatgtctccgtggatcagccacagggatagggattttgtttttaagggaaagcattctctaattccctttgttcatgccgagattcagttgctctgagactatggggtacaagtttgatcctccgaatctggagatgttgtagagctggaacgagtgcagagtaggaacgctttgatgcgcatgcacattggggaagatgcgctcctcagggacacaaaggccgagtggggtaaaaccacgaagggagggaagggaagtcagctctgggagcagccctcactggctggaccaaggtactcttcctggagtttgccgtgttagcaaccacagtcaccttgcagtcaggctggaatcttgggccaccccacagtgctttgctgtaggatttagacggggatgaagtgccctccagcctcagagctagccacaaagcccccagagctgaattcattgagtatttgtgcctagggcttgggctgtttgtgtgataccggccccccgacagacaataggctgtgatgacaccccagtctacttccccgatcctgggctccctcttgattagtaggtgacattttccactgtcaggcatcactggggctagtccggcagcgacctagatggggtccacccccattcctgctcaagcatgggcacctaccacatggtttctgctgctcagcctgactgcaactcacctcgaaggcggaccagcctgcctctgtgatgactgcagaagacctccttgggtgtaccaatgcccctcatctcccactttcacacctaaccctgactccttcaccaagaagacgggagtcggcagccaggagttcccgtggcacctctctctcttcgtggctccctgcttcccccttccctctttccgaggaagggtcaacctattctctctcaaaaccaacccctaggccaattgcctggatctcctcccctctcccttctttaaacgagcttgcctccctcctgccaagtttgagggcaaggctaagaaatgtcagccacggaaacaactctaatatctggtgactttgggtaatgtgaatcagtgcctgaggacctttgctgtgtccttggtacagaaccatccacttgacctaactacctcccctggccgcgctctcgctcttctcttctttgttaagccaacaactatcaccctctcctactcttctttctccctgccccctggagggcactgtgtttggttgtgcaaatgtatttactatgcgtgtttccagcagttggcattaaagtgcctttttctaataaaatcagtttattatgaccaaaaaaaaaaaaaaaaggaattc

SEQ ID NO: 5998 - DNA, 4437 bp, Homo sapiens
gcgcggcggccgtggttgcggcgcgggaagtttggatcctggttccgtccgctaggagtctgcgtgcgaggattatggctgctgttcctcaaaataatctacaggagcaactagaacgtcactcagccagaacacttaataataaattaagtctttcaaaaccaaaattttcaggtttcacttttaaaaagaaaacatcttcagataacaatgtatctgtaactaatgtgtcagtagcaaaaacacctgtattaagaaataaagatgttaatgttaccgaagacttttccttcagtgaacctctacccaacaccacaaatcagcaaagggtcaaggacttctttaaaaatgctccagcaggacaggaaacacagagaggtggatcaaaatcattattgccagatttcttgcagactccgaaggaagttgtatgcactacccaaaacacaccaactgtaaagaaatcccgggatactgctctcaagaaattagaatttagttcttcaccagattctttaagtaccatcaatgattgggatgatatggatgactttgatacttctgagacttcaaaatcatttgttacaccaccccaaagtcactttgtaagagtaagcactgctcagaaatcaaaaaagggtaagagaaacttttttaaagcacagctttatacaacaaacacagtaaagactgatttgcctccaccctcctctgaaagcgagcaaatagatttgactgaggaacagaaggatgactcagaatggttaagcagcgatgtgatttgcatcgatgatggccccattgctgaagtgcatataaatgaagatgctcaggaaagtgactctctgaaaactcatttggaagatgaaagagataatagcgaaaagaagaagaatttggaagaagctgaattacattcaactgagaaagttccatgtattgaatttgatgatgatgattatgatacggattttgttccaccttctccagaagaaattatttctgcttcttcttcctcttcaaaatgccttagtacgttaaaggaccttgacacatctgacagaaaagaggatgttcttagcacatcaaaagatcttttgtcaaaacctgagaaaatgagtatgcaggagctgaatccagaaaccagcacagactgtgacgctagacagataagtttacagcagcagcttattcatgtgatggagcacatctgtaaattaattgatactattcctgatgataaactgaaacttttggattgtgggaacgaactgcttcagcagcggaacataagaaggaaacttctaacggaagtagattttaataaaagtgatgccagtcttcttggctcattgtggagatacaggcctgattcacttgatggccctatggagggtgattcctgccctacagggaattctatgaaggagttaaatttttcacaccttccctcaaattctgtttctcctggggactgtttactgactaccaccctaggaaagacaggattctctgccaccaggaagaatctttttgaaaggcctttattcaatacccatttacagaagtcctttgtaagtagcaactgggctgaaacaccaagactaggaaaaaaaaatgaaagctcttatttcccaggaaatgttctcacaagcactgctgtgaaagatcagaataaacatactgcttcaataaatgacttagaaagagaaacccaaccttcctatgatattgataattttgacatagatgactttgatgatgatgatgactgggaagacataatgcataatttagcagccagcaaatcttccacagctgcctatcaacccatcaaggaaggtcggccaattaaatcagtatcagaaagactttcctcagccaagacagactgtcttccagtgtcatctactgctcaaaatataaacttctcagagtcaattcagaattatactgacaagtcagcacaaaatttagcatccagaaatctgaaacatgagcgtttccaaagtcttagttttcctcatacaaaggaaatgatgaagatttttcataaaaaatttggcctgcataattttagaactaatcagctagaggcgatcaatgctgcactgcttggtgaagactgttttatcctgatgccgactggaggtggtaagagtttgtgttaccagctccctgcctgtgtttctcctggggtcactgttgtcatttctcccttgagatcacttatcgtagatcaagtccaaaagctgacttccttggatattccagctacatatctgacaggtgataagactgactcagaagctacaaatatttacctccagttatcaaaaaaagacccaatcataaaacttctatatgtcactccagaaaagatctgtgcaagtaacagactcatttctactctggagaatctctatgagaggaagctcttggcacgttttgttattgatgaagcacattgtgtcagtcagtggggacatgattttcgtcaagattacaaaagaatgaatatgcttcgccagaagtttccttctgttccggtgatggctcttacggccacagctaatcccagggtacagaaggacatcctgactcagctgaagattctcagacctcaggtgtttagcatgagctttaacagacataatctgaaatactatgtattaccgaaaaagcctaaaaaggtggcatttgattgcctagaatggatcagaaagcaccacccatatgattcagggataatttactgcctctccaggcgagaatgtgacaccatggctgacacgttacagagagatgggctcgctgctcttgcttaccatgctggcctcagtgattctgccagagatgaagtgcagcagaagtggattaatcaggatggctgtcaggttatctgtgctacaattgcatttggaatggggattgacaaaccggacgtgcgatttgtgattcatgcatctctccctaaatctgtggagggttactaccaagaatctggcagagctggaagagatggggaaatatctcactgcctgcttttctatacctatcatgatgtgaccagactgaaaagacttataatgatggaaaaagatggaaaccatcatacaagagaaactcacttcaataatttgtatagcatggtacattactgtgaaaatataacggaatgcaggagaatacagcttttggcctactttggtgaaaatggatttaatcctgatttttgtaagaaacacccagatgtttcttgtgataattgctgtaaaacaaaggattataaaacaagagatgtgactgacgatgtgaaaagtattgtaagatttgttcaagaacatagttcatcacaaggaatgagaaatataaaacatgtaggtccttctggaagatttactatgaatatgctggtcgacattttcttggggagtaagagtgcaaaaatccagtcaggtatatttggaaaaggatctgcttattcacgacacaatgccgaaagactttttaaaaagctgatacttgacaagattttggatgaagacttatatatcaatgccaatgaccaggcgatcgcttatgtgatgctcggaaataaagcccaaactgtactaaatggcaatttaaaggtagactttatggaaacagaaaattccagcagtgtgaaaaaacaaaaagcgttagtagcaaaagtgtctcagagggaagagatggttaaaaaatgtcttggagaacttacagaagtctgcaaatctctggggaaagtttttggtgtccattacttcaatatttttaataccgtcactctcaagaagcttgcagaatctttatcttctgatcctgaggttttgcttcaaattgatggtgttactgaagacaaactggaaaaatatggtgcggaagtgatttcagtattacagaaatactctgaatggacatcgccagctgaagacagttccccagggataagcctgtccagcagcagaggccccggaagaagtgccgctgaggagcttgacgaggaaatacccgtatcttcccactactttgcaagtaaaaccagaaatgaaaggaagaggaaaaagatgccagcctcccaaaggtctaagaggagaaaaactgcttccagtggttccaaggcaaagggggggtctgccacatgtagaaagatatcttccaaaacgaaatcctccagcatcattggatccagttcagcctcacatacttctcaagcgacatcaggagccaatagcaaattggggattatggctccaccgaagcctataaatagaccgtttcttaagccttcatatgcattctcataacaaccgaatctcaatgtacatagaccctctttcttgtttgtcagcatctgaccatctgtgactataaagctgttattcttgttataccaaaaaaaaaaaaaaaaaaaaa

SEQ ID NO: 5999 - DNA, 2347 bp, Homo sapiens
gcgcggcgggcatggctcgggtggcgtgggggctgctgtggttgctgctgggcagcgccggggcgcagtacgagaagtacagcttccggggcttcccgcccgaggacctgatgccgctggccgcggcgtacgggcacgctctggagcagtacgagggagagagctggcgcgagagcgcgcgctacctggaggcggcgctgcggctgcaccggctcctgcgcgacagcgaggccttctgccacgccaactgcagcggccccgcgcccgcggccaagcccgatcccgacggcggccgcgcagacgagtgggcctgcgagctgcggctcttcggccgcgtcctggagcgagccgcctgcctgcggcgctgcaagcggacgctgcccgccttccaggtgccctacccgccgcggcagctgctgcgtgacttccagagccgcctgccctaccagtacctgcactacgcgctgttcaaggctaaccggctggagaaggcggtggcggcggcctacaccttcctccagaggaacccgaagcacgagctgaccgccaagtatctcaactactatcaggggatgctggacgtcgccgacgagtccctcacggacctagaggcccagccctacgaggccgtgttcctccgggctgtgaagctctacaacagcggggatttccgcagcagcacggaggacatggagcgggccttgtcagagtacctggcagtctttgcccggtgcctggccggctgtgaaggggcccatgagcaggtggacttcaaggacttctacccggccatagcagatctctttgcagagtccctgcagtgcaaggtggactgtgaggccaatttgacccccaatgtgggtggctacttcgtggacaagttcgtggccaccatgtaccactacctgcagtttgcctactataagttgaatgatgtgcgccaggctgcccgcagcgccgccagctacatgctcttcgaccccaaggacagcgtcatgcagcagaacctggtgtattaccggttccaccgggctcgctggggcctggaagaggaggacttccagccccgggaggaggccatgctctaccacaaccagaccgccgagctgcgggagctgctggagttcacccacatgtacctgcagtcagatgatgagatggagctggaggagacagaaccgcccctggagcctgaggatgccctatctgacgccgagtttgagggggagggtgactacgaggagggcatgtatgctgactggtggcaggagccggatgccaagggtgacgaggccgaggctgagccagagcctgaactcgcatgagaaggggacaccccacaccgctcaagcttgggaagcctggtgccgatggccccaccctcaccagcctgggcagcagcaagaactatttattaaaaacttaagatgggccaggtgcggtggctcacacctgtaatcccagcattttgggaggccaaggtgggtggatcacttgaggccaggagttcaagaccagcctggccaacatgatgagacctccgtctctactaaaatacataaattagccgggtgtggtggcaggcgcctgaaatcccagctactcaagaggctgaggcaggagaatcgcttgaacctgggaggcaaaggttgcggtgaactgagattgcgccaccgcactccagcctgggcgacagagcgagactccatctttaaaaaaaaacaagacgggccggcacggtggctcacgcctgtaatcccagcactgagaggccgatcacttgaggtcaggagttcaagacctgcctggccaacatggtgaaaccccatctctactaaaaaatacaaaaattagccaggcatggtggcacacacctgtaatcgtagctgaggcaggagaatcgcctgaacccaggaggcggagcttgcagtgagccgagatcgtgccactgcactccagcctgggcgacagagtgagactccatctcaaaaaaaaaaaaaaaaaacttaagatggacacagctgactggacccccatcctgcctcacccatgggtgctgcaccccagacccatcctgccacttctatgtctctggaccacaggatggtggtggcattgcaggttggcaagtgggctgatggggtccgccctcctcactgctgagctcctcacctggacagtctcctggacaaggagtttccagctgctggctggagtctcaggccaaattgcagagggtcctccagggtcctgaagagcactggactaagagtctagtggttccagggccctgaccagtaggtgctcaataaatgtttgttgttgaatgaaaaaaaaaaaaaaaaaa

SEQ ID NO: 6000 - DNA, 1558 bp, Homo sapiens
cctctgggaaagggcagcaggagccaggtgtggcagtgacagggaggtgtgaatgaggcaggatgaactggacaggtttgtacaccttgctcagtggcgtgaaccggcattctactgccattggccgagtatggctctcggtcatcttcatcttcagaatcatggtgctggtggtggctgcagagagtgtgtggggtgatgagaaatcttccttcatctgcaacacactccagcctggctgcaacagcgtttgctatgaccaattcttccccatctcccatgtgcggctgtggtccctgcagctcatcctagtttccaccccagctctcctcgtggccatgcacgtggctcaccagcaacacatagagaagaaaatgctacggcttgagggccatggggaccccctacacctggaggaggtgaagaggcacaaggtccacatctcagggacactgtggtggacctatgtcatcagcgtggtgttccggctgttgtttgaggccgtcttcatgtatgtcttttatctgctctaccctggctatgccatggtgcggctggtcaagtgcgacgtctacccctgccccaacacagtggactgcttcgtgtcccgccccaccgagaaaaccgtcttcaccgtcttcatgctagctgcctctggcatctgcatcatcctcaatgtggccgaggtggtgtacctcatcatccgggcctgtgcccgccgagcccagcgccgctccaatccaccttcccgcaagggctcgggcttcggccaccgcctctcacctgaatacaagcagaatgagatcaacaagctgctgagtgagcaggatggctccctgaaagacatactgcgccgcagccctggcaccggggctgggctggctgaaaagagcgaccgctgctcggcctgctgatgccacataccaggcaacctgccatccatccccgaccctgccctgggcgaagccctcctccttctcccctgccggtgcacaggcctctgcctgctggggattactcgatcaaaaccttccttccctggctacttcccttcctcccggggccttccttttaggtgctggagctggaggggtggggagctagaggccacctatgccagtgctcaaggttactgggagtgtgggctgcccttgttgcctgcacccttccctcttccctctccctctctctgggaccactgggtacaagagatgggatgctccgacagcgtctccaattatgaaactaatcttaaccctgtgctgtcagataccctggttttctggagtcacagtcagtgaggaggatgtggtaagaggaggcagagggcaggggtgctgtggacatgtgggtggagaagggagggtggccagcactagtaaaggaggaatagtgcttgctggccacaaggaaaaggaggaggtgtctggggtgagggagttagggagagagaagcaggcagataagttggagcaggggtggtcaaggccacctctgcctctagtccccaaggcctctctctgcctgaaatgttacacattaaacaggattttacagt

SEQ ID NO: 6001 - DNA, 1801 bp, Homo sapiens; identical to SEQ ID NO: 3744

SEQ ID NO: 6002 - DNA, 2232 bp, Homo sapiens
cgtggcactcacccggctcgcgcggccccggccgcccacgccgcgcgtcgttctcccgcccgctcgctccccggcgctcacacctgagctcactcgcgcacgcccgcccggcccgagaaccgcgccgccgcctcggccccgcggaagccccgccgcgccatgtcttcgcctcccgaagggaaactagagactaaagctggacacccgcccgccgtgaaagctggtggaatgcgaattgtgcagaaacacccacatacaggagacaccaaagaagagaaagacaaggatgaccaggaatgggaaagccccagtccacctaaacccactgtgttcatctctggggtcatcgcccggggtgacaaagatttccccccggcggctgcgcaggtggctcaccagaagccgcatgcctccatggacaagcatccttccccaagaacccagcacatccagcagccacgcaagtgagcctggagtccaccagcctgccccatggccccggctctgctgcacttggtatttccctgacagagagaaccagcagtttcgcccaaatcctactctgctgggaaatctaaggcaaaaccaagtgctctgtcctttgccttacatttccatatttaaaactagaaacagcttcagcccaaaccttgtttatggggagtctggttggatgtcatttgaggatcattgtgcccctagaggtgccattagcagaatttgccaagatccgagaaaaattttagctttagttctatttcagcagtcacctgacgtccttgtctatggtcttaaaaacaagaaggcacacatttgagaagatgagattaaggttaggagaaaacctcagtcattgcatgctttttagtatgggccaataaaatctcaacacctgtgggagagtaagaactaagggaatgagtttgggcgccccctcataaaggaccttagaggcagggaacagcaatgccaaatttccctctctcgtgagatgggggatcctgtgcaggctgatgaggcacccatgagaaaagccgaaaaagcatgcatcttagaaatagcccctcaattccaggagtcaacatgccaaagaatgaggctggagacaggtagctccgagggaggacttctggcatgagatctcggcacggcaagcccagcatcgcctcagcccagacaggctccaccaggagatcaagcaagggctgcctttcaggagtcacctcctgagccacttcagagttctggaagtgaccacggaccagggtggaggaatagacttctagttcattctgggacacttgagccagagagttgaaagcttggaaagaccagataagaaacctgccctttgtctccctagggacatgagacaccacattccatttgtgctagaaaaacctatccactgatgagtctaactgttccaaacgcctcccacctggtgtgcacagctgcctgggtccattgtcacttgggtgcatcaggttgtcctccgatttttagatgagtttcctgtctagagatgtcctagtctgctcactggctggtggcagtagggtaccctgcgtcctcgaaaagccagagggttcacctagtcagacgaaactccagaacagtgcttgtggagggcctgactgtcctgctcacccacagccgatctgctgcaggtcagcaactgtgtcgtgagcagctgccaaccaccagcctttctggtgctgttctccagttcacgtctgccagctggtgagggcagaggcagacctggtcagacccagcgcccctcctccctgagggagcatggcacagcctcacacttgaaagacggtgtttggtttcccatctaatcaacttaagggaagccggcatgtacccttcaaggccctgtcaccacctattttcctgatcagttggtataaactgagggtggcttttagagacccagacttggttggcagcgctgccatggaacaccccagcaagcacctcccagcctgcctttcggagcagcacccaggaggggatgccgcgctccagcaacaccaggtcaggcctgtgcagacccctgccctgccgctgcagaaatccagaagcatccttaatgcttctcagtcttcagccagagggagggctgttatttccagaggtgcgctttttatgtacttttagctagatgtggcatgcatctgtgagctttagatcattaaatccaaaatgtttgcctaaatgagg

SEQ ID NO: 6003 - DNA, 4237 bp, Homo sapiens; identical to SEQ ID NO: 319

SEQ ID NO: 6004 - DNA, 3654 bp, Homo sapiens; identical to SEQ ID NO: 821

SEQ ID NO: 6005 - DNA, 65608 bp, Homo sapiens; identical to SEQ ID NO: 1247
  misc_feature (1)..(65608): n=a,t,g or c

SEQ ID NO: 6006 - DNA, 739 bp, Homo sapiens
acacctggccctgagaactgctgctttctctaggtggtagtgaaggtggcacccactgcaaggtggcaggtcacctactggagaattccagtcctgggcccaggagctggaagtctcactccgtcttctctttcctcagaaccgaaaaaccaaagctatatggtaagaggctgtgcaaccgcctcaatgtgccaacatgcccacctgggtgacgccttcagcatgaaccacattgatgtctcctgctgtactaaaagtggctgtaaccacccagacctggatgtccagtaccgcagtggggctgctcctcagcctggccctgcccatctcagcctcaccatcaccctgctaatgactgccagactgtggggaggcactctcctctggacctaaacctgaaatccccctctctgccctggctggatccgggggacccctttgcccttccctcggctcccagccctacagacttgctgtgtgacctcaggccagtgtgccgacctctctgggcctcagttttcccagctatgaaaacagctatctcacaaagttgtgtgaagcagaagagaaaagctggaggaaggccgtgggcaatgggagagctcttgttattattaatattgttgccgctgttgtgttgttgttattaattaatattcatattatttattttatacttacataaagattttgtaccagtggacaaggccaggtatgcccttctttgtagtgtctatct

SEQ ID NO: 6007 - DNA, 2262 bp, Homo sapiens; identical to SEQ ID NO: 4213

SEQ ID NO: 6008 - DNA, 3331 bp, Homo sapiens
cagaattccaggacaaagagatcttcaaaaatcaaaaatgaggttcacatttacaagccggtgcttggcactgtttcttcttctaaatcacccaaccccaattcttcctgccttttcaaatcaaacctatccaacaatagagcccaagccatttctttacgtcgtaggacgaaagaagatgatggatgcacagtacaaatgctatgaccgaatgcagcagttacccgcataccaaggagaaggtccatattgcaatcgcacctgggatggatggctgtgctgggatgacacaccggctggagtattgtcctatcagttctgcccagattattttccggattttgatccatcagaaaaggttacaaaatactgtgatgaaaaaggtgtttggtttaaacatcctgaaaacaatcgaacctggtccaactatactatgtgcaatgctttcactcctgagaaactgaagaatgcatatgttctgtactatttggctattgtgggtcattctttgtcaattttcaccctagtgatttccctggggattttcgtgtttttcaggagccttggctgccaaagggtaaccctgcacaagaacatgtttcttacttacattctgaattctatgattatcatcatccacctggttgaagtagtacccaatggagagctcgtgcgaagggacccggtgagctgcaagattttgcattttttccaccagtacatgatggcctgcaactatttctggatgctctgtgaagggatctatcttcatacactcattgtcgtggctgtgtttactgagaagcaacgcttgcggtggtattatctcttgggctgggggttcccgctggtgccaaccactatccatgctattaccagggccgtgtacttcaatgacaactgctggctgagtgtggaaacccatttgctttacataatccatggacctgtcatggcggcacttgtggtcaatttcttctttttgctcaacattgtccgggtgcttgtgaccaaaatgagggaaacccatgaggcggaatcccacatgtacctgaaggctgtgaaggccaccatgatccttgtgcccctgctgggaatccagtttgtcgtctttccctggagaccttccaacaagatgcttgggaagatatatgattacgtgatgcactctctgattcatttccagggcttctttgttgcgaccatctactgcttctgcaacaatgaggtccaaaccaccgtgaagcgccaatgggcccaattcaaaattcagtggaaccagcgttgggggaggcgcccctccaaccgctctgctcgcgctgcagccgctgctgcggaggctggcgacatcccaatttacatctgccatcaggagctgaggaatgaaccagccaacaaccaaggcgaggagagtgctgagatcatccctttgaatatcatagagcaagagtcatctgcttgaatgtgaaggcaaacacagcatcgtgatcactgagccatcatttcctgggagaaagaccatgcatttaaagtattctccatcctcccaggaaccgaacatatcatttgtgaagaattattcagtgaatttgtccattgtaaatctgaagaaagttattcttggtactgttgctttgggagacagtctaggaatggagtctcccactgcaacttgtgaactccatcattcatccaggactgagatgcaaatgtcacagtaatgcaagcaaagtatcaaagaaaaacaatgaaattgacctagttcagatacagggtgctccttgtcaatactgagccatttatacctttgaaatattaaaatcactgtcaatatttttatttttaactctggattttgaattagattatttctgtatttggctatggatctgatttttaatttttttaaatttcagtcaattctgatgttactgagatgttttaccatccttacaatgtaaaccacatgaactacgtgacctctgcaagacaaagcggctttctaatagagagattagtaaatatgtgaagaaaaagacctgcatttggcaggaagatgtatgctttgaatgcaaaagaaatttagagtcaatttgctgaaaacattacatgctcagcttggttttggacaagcctgtccattgggcaggacctagctgttgtaaagaattggtcttaatgttgaatgtattttggttgctgatgtttataaactgagaggtcacaaagaatctatcactaaaaatttttacaaaactgccaaaaatataattcttagtggaagacaatactccctttaaagagagtttgccactcccctaaactccaggatttataaagcaaattactccaaggtttataaagcagattacctcttgcccttgggtgctatctagcagtaaaagataaatttgttgaatattggtaattaaaagactccacataagtccattaactgctttccacccagcttcaaagcttaaaaagagctcaggcttttccaggaagatccaggagggctaattagaaatcaacttgtggttgaccgcttgtttcttgttattaccaaacaggaggggaaaaaattaactgctccaaatttaaccataaatcaattcatgtttaacgtttctcattaaaatccagtattatattatcatatctctctttacttcccagtataagatttttgaaaatcctgaataaaccagtatcgttactggcacctgaaattaatttgtgaatttgcaacagtaatcagagttaccattatttaatttgtatgctaaatgaggaggtacattgaaaccctccaaatctccagtctcatctatgtcatattttgccactgcctttcagaagtgatttagttgtggaaagataataaattgatttgttatggttacatatttagcgcacccagagaaaattaattatatttctacagagaaaatgaatttgggatactaaagtagtttaagtctcctttactgaatgtaagggggggatcgaaaagaaggtatttttccaatcacagtgttatgtagtattgttctatttttgtttacaaacatggaaaacagagtatttctggcagctgtggtacaaatgtgataatatattgctaaaatattttagatgttattatgctaatatagtaggggttgaagaaaacaaaatagcttattatagaattgcacatagttctgcccaaattatgtgaaatgcttatgcttgtgtatatgtataaattaatacagagtacgttaaaagcaaaaagatgtatatttgcatatttttctaaagaaatatattattcatcttttcattc

SEQ ID NO: 6009 - DNA, 2110 bp, Homo sapiens; identical to SEQ ID NO: 3764

SEQ ID NO: 6010 - DNA, 5191 bp, Homo sapiens
gaattcagtaacccaggcattattttatcctcaagtcttaggttggttggagaaagataacaaaaagaaacatgattgtgcagaaacagacaaacctttttggaaagcatttgaaaatggcattccccctccacagtgtgttcacagtgtgggcaaattcactgctctgtcgtactttctgaaaatgaagaactgttacaccaaggtgaattatttataaattatgtacttgcccagaagcgaacagacttttactatcataagaacccttccttggtgtgctctttatctacagaatccaagacctttcaagaaaggtcttggattcttttcttcaggacactaggacataaagccacctttttatgatttgttgaaatttctcactccatcccttttgctgatgatcatgggtcctcagaggtcagacttggtgtccttggataaagagcatgaagcaacagtggctgaaccagagttggaacccagatgctctttccactaagcatacaactttccattagataacacctccctcccaccccaaccaagcagctccagtgcaccactttctggagcataaacataccttaactttacaacttgagtggccttgaatactgttcctatctggaatgtgctgttctctttcatcttcctctattgaagccctcctattcctcaatgccttgctccaactgcctttggaagattctgctcttatgcctccactggaattaatgtcttagtaccacttgtctattctgctatatagtcagtccttacattgctttcttcttctgatagaccaaactctttaaggacaagtacctagtcttatctatttctagatcccccacattactcagaaagttactccataaatgtttgtggaactgatttctatgtgaagacatgtgccccttcactctgttaactagcattagaaaaacaaatcttttgaaaagttgtagtatgcccctaagagcagtaacagttcctagaaactctctaaaatgcttagaaaaagatttattttaaattacctccccaataaaatgattggctggcttatcttcaccatcatgatagcatctgtaattaactgaaaaaaaataattatgccattaaaagaaaatcatccatgatcttgttctaacacctgccactctagtactatatctgtcacatggtctatgataaagttatctagaaataaaaaagcatacaattgataattcaccaaattgtggagcttcagtattttaaatgtatattaaaattaaattattttaaagatcaaagaaaactttcgtcatactccgtatttgataaggaacaaataggaagtgtgatgactcaggtttgccctgaggggatgggccatcagttgcaaatcgtggaatttcctctgacataatgaaaagatgagggtgcataagttctctagtagggtgatgatataaaaagccaccggagcactccataaggcacaaactttcagagacagcagagcacacaagcttctaggacaagagccaggaagaaaccaccggaaggaaccattctcactgtgtgtaaacatgacttccaagctggccgtggctctcttggcagccttcctgatttctgcagctctgtgtgaaggtaagcacatctttctgacctacagcgttttcctatgtctaaatgtgatccttagatagcaaagctattcttgatgctttggtaacaaacatcctttttattcagaaacagaatataatcttagcagtcaattaatgttaaattgaagatttagaaaaaactatatataacacttaggaaatataaaggtttgatcaatatagatattctgcttttataatttataccaggtagcatgcatatatttaacgtaaataagtaatttatagtatgtcctattgagaaccacggttacctatattatgtattaatattgagttgagcaaggtaactcagacaattccactccttgtagtatttcattgacaagcctcagatttgtcattaattcctgtctggtttaaagataccctgattatagaccaggcatgtataacttatttatatatttctgttaattctttctgaaggcaatttctatgctggagagtcttagcttgcctactataaataacactgtggtatcacagaggattatgcaatattgaccagataaaaataccatgaagatgttgatattgtacaaaaagaactctaactcttatataggaagttgttcaatgttgtcagttatgactgttttttaaaacaaagaactaactgaggtcaagggctaggagatattcaggaatgagttcactagaaacatgatgccttccatagtctccaaataatcatattggaattagaaggaagtagctggcagagctgtgcctgttgataaaatcaatccttaatcactttttcccccaacaggtgcagttttgccaaggagtgctaaagaacttagatgtcagtgcataaagacatactccaaacctttccaccccaaatttatcaaagaactgagagtgattgagagtggaccacactgcgccaacacagaaattatgtaagtactttaaaaaagattagatattttgttttagcaaacttaaaattaaggaaggtggaaatatttaggaaagttccaggtgttaggattacagtagtaaatgaaacaaaacaaaataaaaatatttgtctacatgacatttaaatatggtagcttccacaactactataaatgttattttggacttagactttatgcctgacttaaggaatcatgatttgaatgcaaaaactaaatattaatctgaaccatttctttcttatttcagtgtaaagctttctgatggaagagagctctgtctggaccccaaggaaaactgggtgcagagggttgtggagaagtttttgaagaggtaagttatatattttttaatttaaatttttcatttatcctgagacatataatccaaagtcagcctataaatttctttctgttgctaaaaatcgtcattaggtatctgcctttttggttaaaaaaaaaggaatagcatcaatagtgagtttgttgtacttatgaccagaaagaccatacatagtttgcccaggaaattctgggtttaagcttgtgtcctatactcttagtaaagttctttgtcactcccagtagtgtcctattttagatgataatttctttgatctccctatttatagttgagaatatagagcatttctaacacatgaatgtcaaagactatattgacttttcaagaaccctactttccttcttattaaacatagctcatctttatatttttaattttattttagggctgagaattcataaaaaaattcattctctgtggtatccaagaatcagtgaagatgccagtgaaacttcaagcaaatctacttcaacacttcatgtattgtgtgggtctgttgtagggttgccagatgcaatacaagattcctggttaaatttgaatttcagtaaacaatgaatagtttttcattgtaccatgaaatatccagaacatacttatatgtaaagtattatttatttgaatctacaaaaaacaacaaataatttttaaatataaggattttcctagatattgcacgggagaatatacaaatagcaaaattgggccaagggccaagagaatatccgaactttaatttcaggaattgaatgggtttgctagaatgtgatatttgaagcatcacataaaaatgatgggacaataaattttgccataaagtcaaatttagctggaaatcctggatttttttctgttaaatctggcaaccctagtctgctagccaggatccacaagtccttgttccactgtgccttggtttctcctttatttctaagtggaaaaagtattagccaccatcttacctcacagtgatgttgtgaggacatgtggaagcactttaagttttttcatcataacataaattattttcaagtgtaacttattaacctatttattatttatgtatttatttaagcatcaaatatttgtgcaagaatttggaaaaatagaagatgaatcattgattgaatagttataaagatgttatagtaaatttattttattttagatattaaatgatgttttattagataaatttcaatcagggtttttagattaaacaaacaaacaattgggtacccagttaaattttcatttcagatatacaacaaataattttttagtataagtacattattgtttatctgaaattttaattgaactaacaatcctagtttgatactcccagtcttgtcattgccagctgtgttggtagtgctgtgttgaattacggaataatgagttagaactattaaaacagccaaaactccacagtcaatattagtaatttcttgctggttgaaacttgtttattatgtacaaatagattcttataatattatttaaatgactgcatttttaaatacaaggctttatatttttaactttagtgtttttatgtgctctccaaattttttttactgtttctgattgtatggaaatataaaagtaaatatgaaacatttaaaatataatttgttgtcaaagtaatcaagtgtttgtcttttttttagttttagcttattgggattctctttgtttatatttaaaattatactttgatttagaaaacataaatgcttccccttagcattttgttatggaaaattacaaacttttatttttagaaaacagaactcctttccagaaataggttacaaacagtagtgtcctccacagaatgttggaaatgttttcaactccccactgtatactatcttgctaataagtctgtcttcagatttcgattaaccggtttgtatgtctgtgcactttagcatagctggacattaaagaggaaagagagtacatattataagttgcttatcagtaactgaggagtaaaactgataaatgtgaggcaaagaagtttaaaatatggttaaagcctaagcatatttgcaaacaaatcaaacaatactctgagaagtaaaaacataattatttaattaacaaatttcagtggataaattttataacaaattagacacagttgaaaataaaattagaaaactagaaaatagaacaaaagaaacttctggaattca

SEQ ID NO: 6011 - DNA, 736 bp, Homo sapiens; identical to SEQ ID NO: 2756

SEQ ID NO: 6012 - DNA, 2441 bp, Homo sapiens; identical to SEQ ID NO: 782

SEQ ID NO: 6013 - DNA, 1956 bp, Homo sapiens
cggtggggaccagacaggactcgtggagacatccaggtgctgaagccttcagctactgtctcagttttttgaagtttagcaatggcgtctttctctgctgagaccaattcaactgacctactctcacagccatggaatgagcccccagtaattctctccatggtcattctcagccttacttttttactgggattgccaggcaatgggctggtgctgtgggtggctggcctgaagatgcagcggacagtgaacacaatttggttcctccacctcaccttggcggacctcctctgctgcctctccttgcccttctcgctggctcacttggctctccagggacagtggccctacggcaggttcctatgcaagctcatcccctccatcattgtcctcaacatgtttgccagtgtcttcctgcttactgccattagcctggatcgctgtcttgtggtattcaagccaatctggtgtcagaatcatcgcaatgtagggatggcctgctctatctgtggatgtatctgggtggtggcttttgtgatgtgcattcctgtgttcgtgtaccgggaaatcttcactacagacaaccataatagatgtggctacaaatttggtctctccagctcattagattatccagacttttatggagatccactagaaaacaggtctcttgaaaacattgttcagcggcctggagaaatgaatgataggttagatccttcctctttccaaacaaatgatcatccttggacagtccccactgtcttccaacctcaaacatttcaaagaccttctgcagattcactccctaggggttctgctaggttaacaagtcaaaatctgtattctaatgtatttaaacctgctgatgtggtctcacctaaaatccccagtgggtttcctattgaagatcacgaaaccagcccactggataactctgatgcttttctctctactcatttaaagctgttccctagcgcttctagcaattccttctacgagtctgagctaccacaaggtttccaggattattacaatttaggccaattcacagatgacgatcaagtgccaacacccctcgtggcaataacgatcactaggctagtggtgggtttcctgctgccctctgttatcatgatagcctgttacagcttcattgtcttccgaatgcaaaggggccgcttcgccaagtctcagagcaaaacctttcgagtggccgtggtggtggtggctgtctttcttgtctgctggactccataccacatttttggagtcctgtcattgcttactgacccagaaactcccttggggaaaactctgatgtcctgggatcatgtatgcattgctctagcatctgccaatagttgctttaatcccttcctttatgccctcttggggaaagattttaggaagaaagcaaggcagtccattcagggaattctggaggcagccttcagtgaggagctcacacgttccacccactgtccctcaaacaatgtcatttcagaaagaaatagtacaactgtgtgaaaatgtggagcagccaacaagcaggggctcttaggcaatcacatagtgaaagtttataagaggatgaagtgatatggtgagcagcggacttcaaaaactgtcaaagaatcaatccagcggttctcaaacggtacacagactattgacatcagcatcacctagaaacttgttagaaatgcaaattctcaagccgcatcccagacttgctgaatcggaatctctgggggttgggacccagcaagggcacttaacaaaccctcgtttctgattaatgctaaatgtaagaatcattgtaaacattagttctatttctatcccaaactaagctatgtgaaataagagaagctactttgtttttaaatgatgttgaatatttgtcgatatttccatcattaaatttttccttagcattgtctaagtcttcca

SEQ ID NO: 6014 - DNA, 1778 bp, Homo sapiens
tgtctcattccttgaaatagaccagcctctcagtgtagatgaagaggggctggtcttactggagcagaagctttcccgagccaagacccagatcaacagccaactgcggcccatgatgtcagagctggaagagagggcacgtcagcagaggggccacctccatttgctggagacaagcatagatgggattctggctgatgtgaagaacttggagaacattagggacaacctgcccccaggctgctacaatacccaggctcttgagcaacagtgaagctgccataaatatttctcaactgaggttcttgggatacagatctcagggctcgggagccatgtcatgtgagtgggtgggatggggacatttgaacatgtttaatgggtatgctcaggtcaactgacctgaccccattcctgatcccatggccaggtggttgtcttattgcaccatactccttgcttcctgatgctgggcaatgaggcagatagcactgggtgtgagaatgatcaaggatctggaccccaaagaatagactggatggaaagacaaactgcacaggcagatgtttgcctcataatagtcgtaagtggagtcctggaatttggacaagtgctgttgggatatagtcaacttattctttgagtaatgtgactaaaggaaaaaactttgactttgcccaggcatgaaattcttcctaatgtcagaacagagtgcaacccagtcacactgtggccagtaaaatactattgcctcatattgtcctctgcaagcttcttgctgatcagagttcctcctacttacaacccagggtgtgaacatgttctccattttcaagctggaagaagtgagcagtgttggagtgaggacctgtaaggcaggcccattcagagctatggtgcttgctggtgcctgccaccttcaagttctggacctgggcatgacatcctttcttttaatgatgccatggcaacttagagattgcatttttattaaagcatttcctaccagcaaagcaaatgttgggaaagtatttactttttcggtttcaaagtgatagaaaagtgtggcttgggcattgaaagaggtaaaattctctagatttattagtcctaattcaatcctacttttcgaacaccaaaaatgatgcgcatcaatgtattttatcttattttctcaatctcctctctctttcctccacccataataagagaatgttcctactcacacttcagctgggtcacatccatccctccattcatccttccatccatctttccatccattacctccatccatccttccaacatatatttattgagtacctactgtgtgccaggggctggtgggacagtggtgacatagtctctgccctcatagagttgattgtctagtgaggaagacaagcatttttaaaaaataaatttaaacttacaaactttgtttgtcacaagtggtgtttattgcaataaccgcttggtttgcaacctctttgctcaacagaacatatgttgcaagaccctcccatgggggcacttgagttttggcaaggctgacagagctctgggttgtgcacatttctttgcattccagctgtcactctgtgcctttctacaactgattgcaacagactgttgagttatgataacaccagtgggaattgctggaggaaccagaggcacttccaccttggctgggaagactatggtgctgccttgcttctgtatttccttggattttcctgaaagtgtttttaaataaagaacaattgttagatgcc

SEQ ID NO: 6015 - DNA, 3492 bp, Homo sapiens
cagctaagacccggagaggtggaatttcactttgaaattcccttgcctcgtgagggccggcgctgggcatgctcagtagccgcggcgctgctgctgggctgctgggctggcgcggagtccaccctgccgtctccgccttggcttctgggcgtccagaaggccaggcatttgccgcctctgagcgcttctgttccccttacccgcaacctcctactgctcttcctctctccctctcttagggaggttgaagctggtgctggtttctgtcggcgccacagactgactgctctgcaaaccccagccgaggacctgaatcccggagactagaagacccttggcggtggctctttctaatagcactttacctgaagtggggtcgtggtggagtttctcctccacctctcaatgcaaacactatgcggagagcagtctgcttccctgcgctgtgcctgctccttaatcttcacgctgcagggtgcttttcaggaaacaatgatcattttttggcaattaatcagaagaagagtgggaagccggtattcatttataagcattcacaagacattgagaagagcctggatatagccccacaaaaaatctacagacatagctaccattcctcttccgaagctcaagtaagcaaacgccaccagattgtcaattcagcatttcctagacccgcatatgacccgtctctcaatctgctggccatggatggtcaagatcttgaagtggaaaatctcccaatcccagcagcaaatgtaattgtggtgacactgcaaatggatgtaaacaagctgaacataaccttgcttcggatcttccgccaaggagtggctgcagctttaggactcttaccccagcaagtgcacatcaatcgcctcattggaaagaagaacagtattgaactgtttgtgtctcccataaaccgaaaaacaggaatttctgatgctctgccctctgaggaagttcttcgttcacttaatatcaatgttttgcatcaaagtttatcccagtttggaattacagaagtctctcctgagaaaaatgttttacaagggcagcatgaagcggacaaaatctggagcaaagaaggattttatgctgttgtcatttttctcagcatctttgttattatagtaacgtgtttgatgattctttacagattaaaagaaagatttcagctttccttaagacaagacaaagagaaaaaccaggagatccacctatcgcccatcacattacagccagcactgtccgaggcaaagacagtccacagcatggtccaacctgagcaggccccaaaggtactgaatgttgtcgtggaccctcaaggccgaggtgctcctgagatcagagctaccaccgctacctctgtttgcccttctcctttcaaaatgaagcccataggacttcaagagagaagagggtccaacgtatctcttacattggacatgagtagcttggggaacattgaaccctttgtgtctataccaacaccacgggagaaggtagcaatggagtatctgcagtcagccagccgaattctcacaaggtctcagctgagggacgtcgtggcaagttcacatttactccaaagtgaattcatggaaataccgatgaactttgtggatcccaaagaaattgatattccgcgtcatggaactaaaaatcgctataagaccattttaccaaatcccctcagcagagtgtgtttaagaccaaaaaatgtaaccgattcattgagcacctacattaatgctaattatattaggggctacagtggcaaggagaaagccttcattgccacgcagggccccatgatcaacaccgtggatgatttctggcagatggtttggcaggaagacagccctgtgattgttatgatcacaaaactcaaagaaaaaaatgagaaatgtgtgctatactggccggaaaagagagggatatatggaaaagttgaggttctggttatcagtgtaaatgaatgtgataactacaccattcgaaaccttgtcttaaagcaaggaagccacacccaacatgtgaagcattactggtacacctcatggcctgatcacaagactccagacagtgcccagcccctcctacagctcatgctggatgtagaagaagacagacttgcttcccagggccgagggcctgtggttgtccactgcagtgcaggaataggtagaacagggtgttttattgctacatccattggctgtcaacagctgaaagaagaaggagttgtggatgcactaagcattgtctgccagcttcgtatggatagaggtggaatggtccaaaccagtgagcagtatgaatttgtgcaccatgctctgtgcctgtatgagagcagactttcagcagagactgtccagtgagtcattgaagacttgtcagaccatcaatctcttggggtgattaatcaaattacccacccaaggcttctagaaggagcttcctgcaatggaaggaaggagaagctctgaagcccatgtatggcatggattgtggaagactgggcaacatatttaagatttccagctccttgtgtatatgaatgcatttgtaagcatcccccaaattattctgaaggttttttgatgatggaggtatgataggtttatcacacagcctaaggcagattttgttttgtctgtactgactctatctgccacacagaatgtatgtatgtaatattcagtaataaatgtcatcaggtgatgactggatgagctgctgaagacattcgtattatgtgttagatgctttaatgtttgcaaaatctgccttgtgaatggactgtcagctgttaaactgttcctgttttgaagtgctattacctttctcagttaccagaatcttgctgctaaagttgcaagtgattgataatggatttttaacagagaagtctttgtttttgaaaaacaaaaatcaaaaacagtaactattttatatggaaatgtgtcttgataatattacctattaaatgtgtatttatagtccctcctatcaaacaattacagagcacaatgattgtcattgggtatatatgtatttactctctattattgggcataaaggtggcttctgctccagaactctatccactgtatttccacatcgtgagtcattttactttaaaagggaaaaacaaatttgtagcaactctgaagtatcaagagttttaactacttgactctcttttgctaagaagggatttttgaatatgctatctacctggaatctctctctcaacaaaaggtatatgccttcaggaatgatataatctgtcccattttcgaggctccttataaggacatttccatgtatgtccttacatttctgaaagctttcaatcttcaagagccaaaaaaaattaaaataactaccctcagcaaacactagctgttctgctcatatatgaatttttaatgcagcaatgttgactttgtttcatactgccaataaactcttaatact

SEQ ID NO: 6016 - DNA, 408 bp, Homo sapiens
  misc_feature (1)..(408): n=a,t,g or c
gctgcagatcgaggactttctggaggagacgctggggccgcccgacttccccagcctggcgcctcgttacagggagtccaacaccgccggcaacgacgttttccacaagttctccgcgttcatcaagaacccggtgcccgcgcaggacgaagccctgtaccagcagctgctgcgcgccctcgccaggctggacagctacctgcgcgcgcccctggagcacgagctggcgggggagcnaagcctgcgcgangtcccgccgccgcttcctggacggcgacaggctcacgctggccgacnttgggnagcctcctggccaagctgcacatcgtcgacacggtgtgcgcgcacttccgccagcgcccatcnccgcggagtggcgcggcgtacgtancgttnggacagcgcgat

SEQ ID NO: 6017 - DNA, 458 bp, Homo sapiens
  misc_feature (1)..(458): n=a,t,g or c
aaagaagtaggtgctgcacacaaatatgtaaagcaattgtaggaaatttgaaaggaaaaaaagaaaccgaagccagtattttaataattgctttttctgtgtattttgtattgggctgggggatagcatcaaaggttgaactttttgagctttctatgaaaaaccccaggaccttctttctttggccatttctatggaaatgcgatgtcagatggatggtaatggtgccctccagtggctgtgagacctcattgcgcattgtctactggagctttagtcttctgagacggaggaaaactgctgaatactctggattcatctatgtctacaatgttgcatttatgaaaaactacactgtgctaggcgcattcttaggacatgaatatgaccacaccctctttcaccgggtgtttctgtagcaaagttttcataattcntttcaaacaatgggtttctcn

SEQ ID NO: 6018 - DNA, 411 bp, Homo sapiens; identical to SEQ ID NO: 560
  misc_feature (1)..(411): n=a,t,g or c

SEQ ID NO: 6019 - DNA, 596 bp, Homo sapiens; identical to SEQ ID NO: 882
  misc_feature (1)..(596): n=a,t,g or c

SEQ ID NO: 6020 - DNA, 379 bp, Homo sapiens
gagaaaacagcaacaagctgagctgctgtgacagaggggaacaagatggcggcgccgaaggggagcctctgggtgaggacccaactggggctcccgccgctgctgctgctgaccatggccttggccggaggttcggggaccgcttcggctgaagcatttgactcggtctctgggtgatacggcgtcttgccaccgggcctgtcagttgacctaccccttgcacacctaccctaaggaagaggagttgtacgcatgtcagagaggttgcaggctgttttcaatttgtcagtttgtggatgatggaattgacttaaatcgacctaaattggaatgtgaatctgcatgtacagaagcatattcccaatctgatgagcaatat

SEQ ID NO: 6021 - DNA, 297 bp, Homo sapiens
agatacagagataaacgagtacatgattatgatatgagggtggatgatttccttcgtcgcacacaagctgttgtcagtggccggagaagtagaccccgtgaaagagaccgggaacgagagcgagaccgccctagagataacagacgagacagagagcgagatagaggacgtgatagagaaagagaaagagagcgattatgtgatcgagacagagaccgaggggagagaggtcgatatagaagataatgggcttttggaagcactgattgtttaaagatacaaaaaatcttgtatttt

SEQ ID NO: 6022 - DNA, 301 bp, Homo sapiens
gaacattctctttcctcgaggaactcaatctacagaagggtcaccagtctcacaaatgtctgtatcgagatcttccagtttgaagtcttcctcctctgtgtcttcccaaggctctgtggcaagctccactggttctcccgcttccatcagaaccactgacttccacaatcctggctatcccaagtacctgggcacccccacctgggactgtacttgagtgactcacttaggacttgaacaaagagcggcaattccacttcgctggtatcaggtccggctcaccacatgctgcctatctgtc

SEQ ID NO: 6023 - DNA, 301 bp, Homo sapiens
gaaatggatccggtagccgagttcccccagcctcccggtgctgcgcgctgggctgaggcctttctgcgatgttttacctggctgcggctgtgtcagatttctatgttcctgtctctgaaatgcctgaacacaagatccagtcatctgggggcccactgcagataacaatgaagatggtgccaaaactgctttctcctttggttaaagattgggctcccaaagcatttataatttcctttaagttggagactgaccccgccattgtaattaatcgagctcggaggctttggaaatttatcca

SEQ ID NO: 6024 - DNA, 320 bp, Homo sapiens; identical to SEQ ID NO: 2077

SEQ ID NO: 6025 - DNA, 420 bp, Homo sapiens
caccagatgaccacggcagggccgtgctgggtgagggccggggctccgatgccttcttcgacgcgctggaccacgtcatagacatacacggacacatcatcggcatgggcctgtcgcccgacaacaggtacctgtacgtgaacagccgcgcctggcccaacggtgcggtggtggccgaccccatgcagccgccaccaatcgcggaggagattgacctgctggtgttcgacctcaagaccatgcgggaggtgaggcgggctctgcgtgcgcaccgcgctacacgcccaacgacgagtgcttcttcatcttcctggacgtcagcagggacttcgtggccagcggggcggaggaccggcacggctacatctgggaccgccactacaacatctgtctggccaggctgcggcacgaggatgtggt

SEQ ID NO: 6026 - DNA, 5432 bp, Homo sapiens; identical to SEQ ID NO: 3336

SEQ ID NO: 6027 - DNA, 1086 bp, Homo sapiens; identical to SEQ ID NO: 414

SEQ ID NO: 6028 - DNA, 448 bp, Homo sapiens
gctaaggagagactgtggcaagaacactgcaaacaaaaaaatgttgaaggatgcattcagtctactagcatattcagatccctggaacagcccagttggaaatcagcttgacccgattcagagagaacctgtgtgctcagctcttaacagtgcaatattagaaacccacaatctgccaaagcaacctccacttgccctagcaatgggacaggccacacaatgtctaggactgatggctcgatcaggaattggatcctgcgcatttgccacagtggaagactacctacattagctatgcatttcaagagctcacacttatattgtgggcatatagtcaacatgggaagtagaccagctctgctgatttgaaatttagattttttaattatgtactgggggacaggtttttgtcgctttacattgcttcctagtttacagcatgatggca

SEQ ID NO: 6029 - DNA, 419 bp, Homo sapiens
  misc_feature (1)..(419): n=a,t,g or c
ggttgaagtaggagaatcaaatggagcagttgtnctnccnncaccccatgttcttagaagcacctctgatggagttattctgaccttgagtcactgcctctcatcatttcccagatgtttggtccttgctctccctttgagaatcatctcccattttctttcctctcccacctctatttgaggtaatggcatctgtgccattgggtggtttcactgctccttgacttcatttgcagtttctttcccatgatagtttttagttgggcagtcttaaaactcatctgataggaaggaaattagatgtaatgtgagagagaccacagtaaaatgtggggtatttttggggagtggggtggggttttcaatcttntctttcctccccatccccccatggggtagttattgggagatccacttcc

SEQ ID NO: 6030 - DNA, 409 bp, Homo sapiens
  misc_feature (1)..(409): n=a,t,g or c
ggcacgagcaaccaacatcttgtaacttgctttccccaccctgtttctgggggcagagcaanttgcccaatttctaccctaatccaaagtccctggtgtgggtggggttaaacgtgctggtgcatcctaggtcatccaagagtgagcgccaagtcctgagaaggggcacagaactccctggagggtggagatggagcacctgccccccatggcagggtacactctccccacagccttcctccccaccatcccgtggggacttttcgggatttaagcactcgtctctctngggaggcccagaccccactccatttattagggcacatcttcctttcatttcctaggtcaattgcccntttgtttttacagttcctggcctgctncctttgancacagnttgggtttacaa

SEQ ID NO: 6031 - DNA, 271 bp, Homo sapiens
ggcccaggaagagggggtgctggtttgagggccaccactgcagttctgctaggtctgcttcctgcccaggaaggtgcctgcacatgagaggagagaaatacacgtctgataagacttcatgaaataataattatagcaaagaacagtttggtggtcttttctcttccactgatttttctgtaatgacattatacctttattacctctttattttattacctctataataaaatgatacctttcatgtaaaaaaaaaaaaaaaaaaattcct

SEQ ID NO: 6032 - DNA, 406 bp, Homo sapiens
  misc_feature (1)..(406): n=a,t,g or c
caacccttgaatatcagatgaagagaaaacttgactccaacatcttaccacaactctggtttcttcctgcagaattcattttcagaggaaaatgatgaatcatccctgtctgtgaaccactgtgctttccttgagggtggcattgtaggttgacaccagcaaagactcagagtgacttgagcattggagatccttctacttggctgctgtattcatgcattatgttggtttgagaatagctagtgtattgatccaagtagtcaaagtgtcttaaaaggacacctatttgtccttttgagccccagctggagtngaatactggatagtgggactaggaaaagcatagtccaaggaaaagtggacccaccttgtttanttggaccaggcagttntagctggaggaggt

SEQ ID NO: 6033 - DNA, 415 bp, Homo sapiens; identical to SEQ ID NO: 4654
  misc_feature (1)..(415): n=a,t,g or c

SEQ ID NO: 6034 - DNA, 310 bp, Homo sapiens
atggggattcatcatgttgaccaggctggcctcaaactcctgacttcaagcgatctccccgctttggcctcccaaagtgctgggattgcaggtgtgagccaccgcgcctggccctaaatagattttttaaaatggatgcttagcaagaacaaaaggaaaaaaaacacccatccctcaaaaaggccaaggtcccgtccccctgttgtcggtgatttgtttgtctttctgataggttgaaaattgtgtaataaacttgatgacgctgtcaatcttttaaaaaaaaaaaaaaaaaaaaaaaaaaaaaaagaaa

SEQ ID NO: 6035 - DNA, 498 bp, Homo sapiens; identical to SEQ ID NO: 3589

SEQ ID NO: 6036 - DNA, 498 bp, Homo sapiens; identical to SEQ ID NO: 3589

SEQ ID NO: 6037 - DNA, 506 bp, Homo sapiens
ggtccggaacccgtgagcggctgccaggggctctgggagggctgccggcagccccgtccccctcccgcccttggttttagcagaacgggtaaactctgtttcctttgtccgtcctgttgtgagtaactgaagcctaggccccgtccccacctcaaatcacacacaccccctccccaccacagagacaccattacatacacagacacacacagaaagacacacacagacacaaaatcacacacacaccctccccgccacagagacaccattacatacacagacacacacagaaagacacagacacaaaatcacacacacaccctccccgccacagagacacaccattacatacacagacacgcaatcgcagatacgcccttccggccacagaaacacaccattacacacacatacacagaaagacacacacagacacacaatcacacgcagcccctccccgccacagagacacaccattacatacacagacacacacagaaagacac

SEQ ID NO: 6038 - DNA, 2066 bp, Homo sapiens; identical to SEQ ID NO: 503

SEQ ID NO: 6039 - DNA, 2066 bp, Homo sapiens; identical to SEQ ID NO: 503
